(19) United States
(12) Patent Application Publication
(10) Pub. No.: US 2025/0333732 A1
(43) Pub. Date: Oct. 30, 2025

(54) TREATMENT OF SOS2 RELATED DISEASES AND DISORDERS

(71) Applicants: Empirico Inc., San Diego, CA (US); Empirico Inc., San Diego, CA (US)

(72) Inventors: Omri GOTTESMAN, San Diego, CA (US); Shannon BRUSE, San Diego, CA (US); Brian CAJES, San Diego, CA (US); David LEWIS, Madison, WI (US); David JAKUBOSKY, San Diego, CA (US); Gregory MCINNES, San Diego, CA (US); David ROZEMA, Cross Plains, WI (US); John VEKICH, San Diego, CA (US)

(21) Appl. No.: 18/866,499

(22) PCT Filed: May 23, 2023
(86) PCT No.: PCT/US2023/067360

§ 371 Date: Nov. 15, 2024

Related U.S. Application Data
(60) Provisional application No. 63/344,836, filed on May 23, 2022.

(51) Int. Cl. C12N 15/113

(52) U.S. Cl. CPC C12N 15/113; C12N 2310/11; C12N 2310/14; C12N 2310/315; C12N 2310/321; C12N 2310/322; C12N 2310/3231; C12N 2310/344; C12N 2310/3515; C12N 2310/3517; C12N 2320/30

(57) ABSTRACT

Disclosed herein are compositions comprising an oligonucleotide that targets SOS Ras/Rho guanine nucleotide exchange factor 2 (SOS2). The oligonucleotide may include a small interfering RNA (siRNA) or an antisense oligonucleotide (ASO). Also provided herein are methods of treating conditions associated with SOS2 mutations that include providing an oligonucleotide that targets SOS2 to a subject.

### CROSS-REFERENCE

[0001] This application claims the benefit of U.S. Provisional Application No. 63/344,836, filed on May 23, 2022, which application is incorporated herein by reference.

### INCORPORATION BY REFERENCE OF SEQUENCE LISTING

[0002] The present application is being filed along with a Sequence Listing in electronic format. The Sequence Listing is provided as a file entitled 54462-741_601_SL_1.xml, created May 18, 2023, which is 9,932,318 bytes in size. The information in the electronic format of the Sequence Listing is incorporated by reference in its entirety.

### BACKGROUND

[0003] Indications such as chronic kidney disease, diabetic nephropathy, gout, hyperuricemia, hypertension, cerebrovascular disease, type 2 diabetes, metabolic syndrome, obesity, hyperlipidemia, hypertriglyceridemia, glaucoma, ocular hypertension, retinal diseases, age-related macular degeneration, choroidal neovascularization, geographic atrophy, diabetic retinopathy, non-alcoholic fatty liver disease, fibrotic liver disease, liver fibrosis, cirrhosis, or hair loss may affect a wide variety of persons. Improved therapeutics are needed.

### SUMMARY

[0004] In certain aspects, disclosed herein is a composition comprising an oligonucleotide that targets SOS2 and when administered to a subject in an effective amount increases an estimated glomerular filtration rate, or decreases a creatinine, blood urea nitrogen, proteinuria microalbuminuria measurement, or urine albumin creatinine ratio. In some embodiments, the estimated glomerular filtration rate is increased, or the creatinine, blood urea nitrogen, proteinuria, microalbuminuria measurement or urine albumin creatinine ratio is decreased, by about 10% or more, as compared to prior to administration.

[0005] In certain aspects, disclosed herein is a composition comprising an oligonucleotide that targets SOS2 and when administered to a subject in an effective amount decreases a blood urate measurement. In some embodiments, the blood urate measurement is decreased by about 10% or more, as compared to prior to administration.

[0006] In certain aspects, disclosed herein is a composition comprising an oligonucleotide that targets SOS2 and when administered to a subject in an effective amount decreases a systolic blood pressure measurement, a diastolic blood pressure measurement, a mean arterial pressure, or a pulse pressure. In some embodiments, the systolic blood pressure measurement, diastolic blood pressure measurement, mean arterial pressure, or pulse pressure is decreased by about 10% or more, as compared to prior to administration.

[0007] In certain aspects, disclosed herein is a composition comprising an oligonucleotide that targets SOS2 and when administered to a subject in an effective amount decreases an intraocular pressure measurement, cup-disc ratio, optic nerve cupping, RPE pigmentation and reflectivity, drusen, Macular hemorrhage, choroidal neovascularization, edema, microaneurysms, intraretinal hemorrhage, macular ischemia, neovascularization, vitreous hemorrhage, or traction retinal detachment or increases a RNFL thickness or retinal thickness. In some embodiments, the intraocular pressure measurement, cup-disc ratio, optic nerve cupping, RPE pigmentation and reflectivity, drusen, Macular hemorrhage, choroidal neovascularization, edema, microaneurysms, intraretinal hemorrhage, macular ischemia, neovascularization, vitreous hemorrhage, or traction retinal detachment is decreased or the RNFL thickness or retinal thickness is increased by about 10% or more, as compared to prior to administration.

[0008] In certain aspects, disclosed herein is a composition comprising an oligonucleotide that targets SOS2 and when administered to a subject in an effective amount decreases a body mass index (BMI) measurement, a body weight measurement, a waist circumference measurement, a hip circumference measurement, a waist-hip ratio (WHR), a body fat percentage measurement, a hemoglobin A1C measurement, a blood glucose measurement, a glucose tolerance measurement, an insulin sensitivity measurement, a blood triglyceride measurement, or a non-HDL cholesterol measurement. In some embodiments, the body mass index (BMI) measurement, the body weight measurement, the waist circumference measurement, the hip circumference measurement, the waist-hip ratio (WHR), the body fat percentage measurement, the hemoglobin A1C measurement, the blood glucose measurement, the glucose tolerance measurement, the insulin sensitivity measurement, the blood triglyceride measurement, or the non-HDL cholesterol measurement is decreased by about 10% or more, as compared to prior to administration.

[0009] In certain aspects, disclosed herein is a composition comprising an oligonucleotide that targets SOS2 and when administered to a subject in an effective amount decreases an alanine aminotransferase, aspartate aminotransferase, liver fat percentage measurement, liver fibrosis score, NAFLD activity score, or blood gamma-glutamyl transferase measurement. In some embodiments, the alanine aminotransferase, aspartate aminotransferase, liver fat percentage measurement, liver fibrosis score, NAFLD activity score, or blood gamma-glutamyl transferase measurement is decreased by about 10% or more, as compared to prior to administration. In some embodiments, the oligonucleotide comprises a small interfering RNA (siRNA) comprising a sense strand and an antisense strand. In some embodiments, the sense strand is 12-30 nucleosides in length. In some embodiments, the sense strand comprises the sequence of any one of SEQ ID NOs: 1-5490, or a nucleic acid sequence thereof having 1 or 2 nucleoside substitutions, additions, or deletions. In some embodiments, the sense strand comprises the sequence of any one of SEQ ID NOs: 1-5490. In some embodiments, the antisense strand is 12-30 nucleosides in length. In some embodiments, the antisense strand comprises the sequence of any one of SEQ ID NOs: 5491-10980, or a nucleic acid sequence thereof having 1 or 2 nucleoside substitutions, additions, or deletions. In some embodiments, the antisense strand comprises the sequence of any one of SEQ ID NOs: 5491-10980. In some embodiments, the sense or antisense strand comprises a sense or antisense sequence of an siRNA of any one of Tables 35-35, or a nucleic acid sequence thereof having 1 or 2 nucleoside substitutions, additions, or deletions. In some embodiments, the sense or antisense strand comprises a sense or antisense sequence of an siRNA of any one of Tables 15-25. In some embodiments, any one of the following is true with regard to the sense strand: all purines comprise 2′ fluoro modified purines, and all pyrimidines comprise a mixture of 2′ fluoro and 2′-O-methyl modified pyrimidines; all purines comprise 2′-O-methyl modified purines, and all pyrimidines comprise a mixture of 2′ fluoro and 2′-O-methyl modified pyrimidines; all purines comprise 2′ fluoro modified purines, and all pyrimidines comprise 2′-O-methyl modified pyrimidines; all pyrimidines comprise 2′ fluoro modified pyrimidines, and all purines comprise a mixture of 2′ fluoro and 2′-O-methyl modified purines; all pyrimidines comprise 2′-O-methyl modified pyrimidines, and all purines comprise a mixture of 2′ fluoro and 2′-O-methyl modified purines; or all pyrimidines comprise 2′ fluoro modified pyrimidines, and all purines comprise 2′-O-methyl modified purines. In some embodiments, any one of the following is true with regard to the antisense strand: all purines comprise 2′ fluoro modified purines, and all pyrimidines comprise a mixture of 2′ fluoro and 2′-O-methyl modified pyrimidines; all purines comprise 2′-O-methyl modified purines, and all pyrimidines comprise a mixture of 2′ fluoro and 2′-O-methyl modified pyrimidines; all purines comprise 2′-O-methyl modified purines, and all pyrimidines comprise 2′ fluoro modified pyrimidines; all pyrimidines comprise 2′ fluoro modified pyrimidines, and all purines comprise a mixture of 2′ fluoro and 2′-O-methyl modified purines; all pyrimidines comprise 2′-O-methyl modified pyrimidines, and all purines comprise a mixture of 2′ fluoro and 2′-O-methyl modified purines; or all pyrimidines comprise 2′-O-methyl modified pyrimidines, and all purines comprise 2′ fluoro modified purines.

[0010] In certain aspects, disclosed herein is a composition comprising an oligonucleotide that inhibits the expression of SOS2 wherein the oligonucleotide comprises an siRNA comprising a sense strand and an antisense strand, each strand is independently about 12-30 nucleosides in length, and at least one of the sense strand and the antisense strand comprises a nucleoside sequence comprising about 12-30 contiguous nucleosides of SEQ ID NO: 11253. In some embodiments, the oligonucleotide comprises an antisense oligonucleotide (ASO).

[0011] In certain aspects, disclosed herein is a composition comprising an oligonucleotide that inhibits the expression of SOS2 wherein the oligonucleotide comprises an ASO that is complementary to a nucleoside sequence comprising about 12-30 contiguous nucleosides of SEQ ID NO: 11253. In some embodiments, the ASO is 12-30 nucleosides in length.

[0012] In some embodiments, the oligonucleotide comprises a modified internucleoside linkage. In some embodiments, the modified internucleoside linkage comprises alkylphosphonate, phosphorothioate, methylphosphonate, phosphorodithioate, alkylphosphonothioate, phosphoramidate, carbamate, carbonate, phosphate triester, acetamidate, or carboxymethyl ester, or a combination thereof. In some embodiments, the modified internucleoside linkage comprises one or more phosphorothioate linkages. In some embodiments, the oligonucleotide comprises 2, 3, 4, 5, 6, 7, 8, 9, 10, 11, 12, 13, 14, 15, 16, 17, 18, 19, or 20 modified internucleoside linkages. In some embodiments, the oligonucleotide comprises a modified nucleoside. In some embodiments, the modified nucleoside comprises a locked nucleic acid (LNA), hexitol nucleic acid (HLA), cyclohexene nucleic acid (CeNA), 2′-methoxyethyl, 2′-O-alkyl, 2′-O-allyl, 2′-O-allyl, 2′-fluoro, or 2′-deoxy, or a combination thereof. In some embodiments, the modified nucleoside comprises a LNA. In some embodiments, the modified nucleoside comprises a 2′,4′ constrained ethyl nucleic acid. In some embodiments, the modified nucleoside comprises a 2′-O-methyl nucleoside, 2′-deoxyfluoro nucleoside, 2′-O—N-methylacetamido (2′-O-NMA) nucleoside, a 2′-O-dimethylaminoethoxyethyl (2′-O-DMAEOE) nucleoside, 2′-O-aminopropyl (2′-O-AP) nucleoside, or 2′-ara-F, or a combination thereof. In some embodiments, the modified nucleoside comprises one or more 2′fluoro modified nucleosides. In some embodiments, the modified nucleoside comprises a 2′ O-alkyl modified nucleoside. In some embodiments, the oligonucleotide comprises a lipid attached at a 3′ or 5′ terminus of the oligonucleotide. In some embodiments, the lipid comprises cholesterol, myristoyl, palmitoyl, stearoyl, lithocholoyl, docosanoyl, docosahexaenoyl, myristyl, palmityl stearyl, or α-tocopherol, or a combination thereof. In some embodiments, the lipid comprises a 5′ hydrophobic moiety comprising any one of the following structures:

[chemical structure]

wherein the dotted line indicates a covalent connection to the end of the 5′ end of the sense strand, n is 1-3, and R is an alkyl group containing 4-18 carbons. In some embodiments, the oligonucleotide comprises 2, 3, 4, 5, 6, 7, 8, 9, 10, 11, 12, 13, 14, 15, 16, 17, 18, 19, 20, or 21 modified nucleosides. In some embodiments, the oligonucleotide comprises an N-acetylgalactosamine (GalNAc) ligand, an arginine-glycine-aspartic acid (RGD) peptide, or a cholesterol ligand. In some embodiments, the oligonucleotide comprises a GalNAc ligand. In some embodiments, the GalNac ligand comprises

[chemical structure]

wherein n is 1 or 2, and J is the oligonucleotide.

[0013] In certain aspects, disclosed herein is a method of treating chronic kidney disease, diabetic nephropathy, gout, hyperuricemia, hypertension, cerebrovascular disease, type 2 diabetes, metabolic syndrome, obesity, hyperlipidemia, hypertriglyceridemia, glaucoma, ocular hypertension, retinal diseases, age-related macular degeneration, choroidal neovascularization, geographic atrophy, diabetic retinopathy, non-alcoholic fatty liver disease, fibrotic liver disease, liver fibrosis, cirrhosis, or hair loss in a subject in need thereof comprising administering to the subject a composition described herein.

[0014] In certain aspects, disclosed herein is a composition comprising an oligonucleotide that targets SOS2, wherein the oligonucleotide comprises a small interfering RNA (siRNA) comprising a sense strand and an antisense strand; and wherein the sense strand comprises the nucleoside sequence of any one of SEQ ID NOs: 1-5490 or a nucleic acid sequence thereof having 1 or 2 nucleoside substitutions, additions, or deletions; or wherein the antisense strand comprises the nucleoside sequence of any one of SEQ ID NOs: 5491-10980 or a nucleic acid sequence thereof having 1 or 2 nucleoside substitutions, additions, or deletions.

[0015] In certain aspects, disclosed herein is a composition comprising a compound represented by Formula (I) or (II):

[chemical structure]

or

[chemical structure]

or a salt thereof, wherein J is an oligonucleotide targeting SOS comprising a small interfering RNA (siRNA) comprising a sense strand and an antisense strand; each w is independently selected from any value from 1 to 20; each v is independently selected from any value from 1 to 20; n is selected from any value from 1 to 20; m is selected from any value from 1 to 20; z is selected from any value from 1 to 3, wherein if z is 3, Y is C if z is 2, Y is CR⁶, or if z is 1, Y is C(R⁶)₂; Q is selected from: C₃₋₁₀ carbocycle optionally substituted with one or more substituents independently selected from halogen, —CN, —NO₂, —OR⁷, —SR⁷, —N(R⁷)₂, —C(O)R⁷, —C(O)N(R⁷)₂, —N(R⁷)C(O)R⁷, —N(R⁷)C(O)N(R⁷)₂, —OC(O)N(R⁷)₂, —N(R⁷)C(O)OR⁷, —C(O)OR⁷, —OC(O)R⁷, —S(O)R⁷, and C₁₋₆ alkyl, wherein the C₁₋₆ alkyl, is optionally substituted with one or more substituents independently selected from halogen, —CN, —OH, —SH, —NO₂, and —NH₂; R¹ is a linker selected from: —O—, —S—, —N(R⁷)—, —C(O)—, —C(O)N(R⁷)—, —N(R⁷)C(O)—, —N(R⁷)C(O)N(R⁷)—, —OC(O)N(R⁷)—, —N(R⁷)C(O)O—, —C(O)O—, —OC(O)—, —S(O)—, —S(O)₂—, —OS(O)₂—, —OP(O)(OR⁷)O—, —SP(O)(OR⁷)O—, —OP(S)(OR⁷)O—, —OP(O)(SR⁷)O—, —OP(O)(OR⁷)S—, —OP(O)(O⁻)O—, —SP(O)(O⁻)O—, —OP(S)(O⁻)O—, —OP(O)(S⁻)O—, —OP(O)(O⁻)S—, —OP(O)(OR⁷)NR⁷—, —OP(O)(N(R⁷)₂)NR⁷—, —OP(OR⁷)O—, —OP(N(R⁷)₂)O—, —OP(OR⁷)N(R⁷)—, and —OPN(R⁷)₂NR⁷—; each R² is independently selected from: C₁₋₆ alkyl optionally substituted with one or more substituents independently selected from halogen, —OR⁷, —SR⁷, —N(R⁷)₂, —C(O)R⁷, —C(O)N(R⁷)₂, —N(R⁷)C(O)R⁷, —N(R⁷)C(O)N(R⁷)₂, —OC(O)N(R⁷)₂, —N(R⁷)C(O)OR⁷, —C(O)OR⁷, —OC(O)R⁷, and —S(O)R⁷; R³ and R⁴ are each independently selected from: —OR⁷, —SR⁷, —N(R⁷)₂, —C(O)R⁷, —C(O)N(R⁷)₂, —N(R⁷)C(O)R⁷, —N(R⁷)C(O)N(R⁷)₂, —OC(O)N(R⁷)₂, —N(R⁷)C(O)OR⁷, —C(O)OR⁷, —OC(O)R⁷, and —S(O)R⁷; each R⁵ is independently selected from: —OC(O)R⁷, —OC(O)N(R⁷)₂, —N(R⁷)C(O)R⁷, —N(R⁷)C(O)N(R⁷)₂, —N(R⁷)C(O)OR⁷, —C(O)R⁷, —C(O)OR⁷, and —C(O)N(R⁷)₂; each R⁶ is independently selected from: hydrogen; halogen, —CN, —NO₂, —OR⁷, —SR⁷, —N(R⁷)₂, —C(O)R⁷, —C(O)N(R⁷)₂, —N(R⁷)C(O)R⁷, —N(R⁷)C(O)N(R⁷)₂, —OC(O)N(R⁷)₂, —N(R⁷)C(O)OR⁷, —C(O)OR⁷, —OC(O)R⁷, and —S(O)R⁷; and C₁₋₆ alkyl optionally substituted with one or more substituents independently selected from halogen, —CN, —NO₂, —OR⁷, —SR⁷, —N(R⁷)₂, —C(O)R⁷, —C(O)N(R⁷)₂, —N(R⁷)C(O)R⁷, —N(R⁷)C(O)N(R⁷)₂, —OC(O)N(R⁷)₂, —N(R⁷)C(O)OR⁷, —C(O)OR⁷, —OC(O)R⁷, and —S(O)R⁷; each R⁷ is independently selected from: hydrogen; C₁₋₆ alkyl, C₂₋₆ alkenyl, and C₂₋₆ alkynyl, each of which is optionally substituted with one or more substituents independently selected from halogen, —CN, —OH, —SH, —NO₂, —NH₂, ═O, ═S, —O—C₁₋₆ alkyl, —S—C₁₋₆ alkyl, —N(C₁₋₆ alkyl)₂, —NH(C₁₋₆ alkyl), C₃₋₁₀ carbocycle, and 3- to 10-membered heterocycle; and C₃₋₁₀ carbocycle, and 3- to 10-membered heterocycle, each of which is optionally substituted with one or more substituents independently selected from halogen, —CN, —OH, —SH, —NO₂, —NH₂, ═O, ═S, —O—C₁₋₆ alkyl, —S—C₁₋₆ alkyl, —N(C₁₋₆ alkyl)₂, —NH(C₁₋₆ alkyl), C₁₋₆ alkyl, C₂₋₆ alkenyl, C₂₋₆ alkynyl, C₃₋₁₀ carbocycle, 3- to 10-membered heterocycle, and C₁₋₆ haloalkyl.

[0016] A composition comprising an oligonucleotide that inhibits the expression of SOS2 wherein the oligonucleotide comprises an siRNA comprising a sense strand and an antisense strand, wherein the oligonucleotide comprises a 5′ hydrophobic moiety comprising any one of the following structures:

[chemical structure]

wherein the dotted line indicates a covalent connection to the end of the 5′ end of the sense strand, n is 1-3, and R is an alkyl group containing 4-18 carbons.

### DETAILED DESCRIPTION OF THE INVENTION

[0017] Large-scale human genetic data can improve the success rate of pharmaceutical discovery and development. A Genome Wide Association Study (GWAS) may detect associations between genetic variants and traits in a population sample. A GWAS may enable better understanding of the biology of disease, and provide applicable treatments. A GWAS can utilize genotyping and/or sequencing data, and often involves an evaluation of millions of genetic variants that are relatively evenly distributed across the genome. The most common GWAS design is the case-control study, which involves comparing variant frequencies in cases versus controls. If a variant has a significantly different frequency in cases versus controls, that variant is said to be associated with disease. Association statistics that may be used in a GWAS are p-values, as a measure of statistical significance; odds ratios (OR), as a measure of effect size; or beta coefficients (beta), as a measure of effect size. Researchers often assume an additive genetic model and calculate an allelic odds ratio, which is the increased (or decreased) risk of disease conferred by each additional copy of an allele (compared to carrying no copies of that allele). An additional concept in design and interpretation of GWAS is that of linkage disequilibrium, which is the non-random association of alleles. The presence of linkage disequilibrium can obfuscate which variant is “causal.”

[0018] Functional annotation of variants and/or wet lab experimentation can identify the causal genetic variant identified via GWAS, and in many cases may lead to the identification of disease-causing genes. In particular, understanding the functional effect of a causal genetic variant (for example, loss of protein function, gain of protein function, increase in gene expression, or decrease in gene expression) may allow that variant to be used as a proxy for therapeutic modulation of the target gene, or to gain insight into potential therapeutic efficacy and safety of a therapeutic that modulates that target.

[0019] Identification of such gene-disease associations has provided insights into disease biology and may be used to identify novel therapeutic targets for the pharmaceutical industry. In order to translate the therapeutic insights derived from human genetics, disease biology in patients may be exogenously ‘programmed’ into replicating the observation from human genetics. There are several potential options for therapeutic modalities that may be brought to bear in translating therapeutic targets identified via human genetics into novel medicines. These may include well established therapeutic modalities such as small molecules and monoclonal antibodies, maturing modalities such as oligonucleotides, and emerging modalities such as gene therapy and gene editing. The choice of therapeutic modality can depend on several factors including the location of a target (for example, intracellular, extracellular, or secreted), a relevant tissue (for example, kidney, liver, adipocyte, or eye) and a relevant indication.

[0020] SOS Ras/Rho guanine nucleotide exchange factor 2 encodes son of sevenless homolog 2 (also “SOS2”), a regulatory protein that may be involved in the positive regulation of ras proteins. SOS2 may map to 14q21 within the human genome. SOS2 may activate RAC1. Mutations in SOS2 may relate to Noonan syndrome. Here it is shown that loss-of-function SOS2 variants resulted in protective associations. Therefore, inhibition of SOS2 may serve as a therapeutic for treatment of SOS2-related diseases and disorders. In particular, it is shown here that loss-of-function genetic variants of SOS2 may be protective for chronic kidney disease, diabetic nephropathy, gout, hyperuricemia, hypertension, cerebrovascular disease, type 2 diabetes, metabolic syndrome, obesity, hyperlipidemia, hypertriglyceridemia, glaucoma, ocular hypertension, retinal diseases, age-related macular degeneration, choroidal neovascularization, geographic atrophy, diabetic retinopathy, non-alcoholic fatty liver disease, fibrotic liver disease, liver fibrosis, cirrhosis, or hair loss (e.g. androgenetic alopecia). Therefore, inhibition of SOS2 may serve as a therapeutic for treatment of these indications.

[0021] Disclosed herein are compositions comprising an oligonucleotide that targets SOS2. The oligonucleotide may include a small interfering RNA (siRNA) or an antisense oligonucleotide (ASO). Also provided herein are methods of treating chronic kidney disease, diabetic nephropathy, gout, hyperuricemia, hypertension, cerebrovascular disease, type 2 diabetes, metabolic syndrome, obesity, hyperlipidemia, hypertriglyceridemia, glaucoma, ocular hypertension, retinal diseases, age-related macular degeneration, choroidal neovascularization, geographic atrophy, diabetic retinopathy, non-alcoholic fatty liver disease, fibrotic liver disease, liver fibrosis, cirrhosis, or hair loss (e.g. androgenetic alopecia) by providing an oligonucleotide that targets SOS2 to a subject in need thereof.

### I. COMPOSITIONS

[0022] Disclosed herein, in some embodiments, are compositions comprising an oligonucleotide. In some embodiments, the composition comprises an oligonucleotide that targets SOS Ras/Rho guanine nucleotide exchange factor 2 (SOS2). In some embodiments, the composition consists of an oligonucleotide that targets SOS2. In some embodiments, the oligonucleotide reduces SOS2 mRNA expression in the subject. In some embodiments, the oligonucleotide reduces son of sevenless homolog 2 (SOS2) protein expression in the subject. The oligonucleotide may include a small interfering RNA (siRNA) described herein. The oligonucleotide may include an antisense oligonucleotide (ASO) described herein. In some embodiments, a composition described herein is used in a method of treating a disorder in a subject in need thereof. Some embodiments relate to a composition comprising an oligonucleotide for use in a method of treating a disorder as described herein. Some embodiments relate to use of a composition comprising an oligonucleotide, in a method of treating a disorder as described herein.

[0023] Some embodiments include a composition comprising an oligonucleotide that targets SOS2 and when administered to a subject in an effective amount decreases SOS2 mRNA or SOS2 protein levels in a cell, fluid or tissue. In some embodiments, the composition comprises an oligonucleotide that targets SOS2 and when administered to a subject in an effective amount decreases SOS2 mRNA levels in a cell or tissue. In some embodiments, the cell is a liver cell (e.g. hepatocyte), kidney cell (e.g. podocyte), eye cell, or adipocyte. In some embodiments, the tissue is liver, kidney, eye, or adipose tissue. In some embodiments, the SOS2 mRNA levels are decreased by about 2.5% or more, about 5% or more, or about 7.5% or more, as compared to prior to administration. In some embodiments, the SOS2 mRNA levels are decreased by about 10% or more, as compared to prior to administration. In some embodiments, the SOS2 mRNA levels are decreased by about 20% or more, about 30% or more, about 40% or more, about 50% or more, about 60% or more, about 70% or more, about 80% or more, about 90% or more, about 95% or more, or about 100%, as compared to prior to administration. In some embodiments, the v mRNA levels are decreased by no more than about 2.5%, no more than about 5%, or no more than about 7.5%, as compared to prior to administration. In some embodiments, the SOS2 mRNA levels are decreased by no more than about 10%, as compared to prior to administration. In some embodiments, the SOS2 mRNA levels are decreased by no more than about 20%, no more than about 30%, no more than about 40%, no more than about 50%, no more than about 60%, no more than about 70%, no more than about 80%, no more than about 90%, or no more than about 100%, as compared to prior to administration. In some embodiments, the SOS2 mRNA levels are decreased by 2.5%, 5%, 7.5%, 10%, 15%, 20%, 25%, 30%, 35%, 40%, 45%, 50%, 55%, 60%, 65%, 70%, 75%, 80%, 85%, 90%, 95%, or 100%, or by a range defined by any of the two aforementioned percentages.

[0024] In some embodiments, the composition comprises an oligonucleotide that targets SOS2 and when administered to a subject in an effective amount decreases SOS2 protein levels in a cell or tissue. In some embodiments, the cell is a liver cell (e.g. hepatocyte), kidney cell (e.g. podocyte), eye cell, or adipocyte. In some embodiments, the tissue is liver, kidney, eye, or adipose tissue. In some embodiments, the SOS2 protein levels are decreased by about 2.5% or more, about 5% or more, or about 7.5% or more, as compared to prior to administration. In some embodiments, the SOS2 protein levels are decreased by about 10% or more, as compared to prior to administration. In some embodiments, the SOS2 protein levels are decreased by about 20% or more, about 30% or more, about 40% or more, about 50% or more, about 60% or more, about 70% or more, about 80% or more, about 90% or more, or about 100%, as compared to prior to administration. In some embodiments, the SOS2 protein levels are decreased by no more than about 2.5%, no more than about 5%, or no more than about 7.5%, as compared to prior to administration. In some embodiments, the SOS2 protein levels are decreased by no more than about 10%, as compared to prior to administration. In some embodiments, the SOS2 protein levels are decreased by no more than about 20%, no more than about 30%, no more than about 40%, no more than about 50%, no more than about 60%, no more than about 70%, no more than about 80%, no more than about 90%, about 95% or more, or no more than about 100%, as compared to prior to administration. In some embodiments, the SOS2 protein levels are decreased by 2.5%, 5%, 7.5%, 10%, 15%, 20%, 25%, 30%, 35%, 40%, 45%, 50%, 55%, 60%, 65%, 70%, 75%, 80%, 85%, 90%, 95%, or 100%, or by a range defined by any of the two aforementioned percentages.

[0025] In some embodiments, the composition comprises an oligonucleotide that targets SOS2 and when administered to a subject in an effective amount decreases a kidney disease-related parameter. In some embodiments, the kidney disease comprises chronic kidney disease (CKD). In some embodiments, the kidney disease comprises diabetic nephropathy. The kidney disease-related parameter may include a blood creatinine measurement. The kidney disease-related parameter may include a blood urea nitrogen (BUN) measurement. The kidney disease-related parameter may include a BUN/creatinine measurement. The parameter may include a proteinuria measurement. The parameter may include a microalbuminuria measurement. The parameter may comprise a urine albumin creatinine ratio. In some embodiments, the kidney disease-related parameter is decreased by about 2.5% or more, about 5% or more, or about 7.5% or more, as compared to prior to administration. In some embodiments, the kidney disease-related parameter is decreased by about 10% or more, as compared to prior to administration. In some embodiments, the kidney disease-related parameter is decreased by about 20% or more, about 30% or more, about 40% or more, about 50% or more, about 60% or more, about 70% or more, about 80% or more, or about 90% or more, as compared to prior to administration. In some embodiments, the kidney disease-related parameter is decreased by no more than about 2.5%, no more than about 5%, or no more than about 7.5%, as compared to prior to administration. In some embodiments, the kidney disease-related parameter is decreased by no more than about 10%, as compared to prior to administration. In some embodiments, the kidney disease-related parameter is decreased by no more than about 20%, no more than about 30%, no more than about 40%, no more than about 50%, no more than about 60%, no more than about 70%, no more than about 80%, no more than about 90%, or no more than about 95%, as compared to prior to administration. In some embodiments, the kidney disease-related parameter is decreased by 2.5%, 5%, 7.5%, 10%, 15%, 20%, 25%, 30%, 35%, 40%, 45%, 50%, 55%, 60%, 65%, 70%, 75%, 80%, 85%, 90%, or 95%, or by a range defined by any of the two aforementioned percentages.

[0026] In some embodiments, the composition comprises an oligonucleotide that targets SOS2 and when administered to a subject in an effective amount increases a kidney disease-related parameter. The kidney disease-related parameter may include a glomerular filtration rate (GFR). The kidney disease-related parameter may include an estimated glomerular filtration rate (eGFR). In some embodiments, the kidney disease-related parameter is increased by about 2.5% or more, about 5% or more, or about 7.5% or more, as compared to prior to administration. In some embodiments, the kidney disease-related parameter is increased by about 10% or more, as compared to prior to administration. In some embodiments, the kidney disease-related parameter is increased by about 20% or more, about 30% or more, about 40% or more, about 50% or more, about 60% or more, about 70% or more, about 80% or more, about 90% or more, or about 100% or more, as compared to prior to administration. In some embodiments, the kidney disease-related parameter is increased by about 200% or more, about 300% or more, about 400% or more, about 500% or more, about 600% or more, about 700% or more, about 800% or more, about 900% or more, or about 1000% or more, as compared to prior to administration. In some embodiments, the kidney disease-related parameter is increased by no more than about 2.5%, no more than about 5%, or no more than about 7.5%, as compared to prior to administration. In some embodiments, the kidney disease-related parameter is increased by no more than about 10%, as compared to prior to administration. In some embodiments, the kidney disease-related parameter is increased by no more than about 20%, no more than about 30%, no more than about 40%, no more than about 50%, no more than about 60%, no more than about 70%, no more than about 80%, no more than about 90%, or no more than about 100%, as compared to prior to administration. In some embodiments, the kidney disease-related parameter is increased by no more than about 200%, no more than about 300%, no more than about 400%, no more than about 500%, no more than about 600%, no more than about 700%, no more than about 800%, no more than about 900%, or no more than about 1000%, as compared to prior to administration. In some embodiments, the kidney disease-related parameter is increased by 2.5%, 5%, 7.5%, 10%, 15%, 20%, 25%, 30%, 35%, 40%, 45%, 50%, 55%, 60%, 65%, 70%, 75%, 80%, 85%, 90%, 95%, 100%, 150%, 200%, 250%, 300%, 400%, 500%, 600%, 700%, 800%, 900%, or 1000%, orby a range defined by any of the two aforementioned percentages.

[0027] In some embodiments, the composition comprises an oligonucleotide that targets SOS2 and when administered to a subject in an effective amount decreases a gout-related or hyperuricemia-related parameter. The gout-related or hyperuricemia-related parameter may comprise a gout-related parameter. The gout-related or hyperuricemia-related parameter may comprise a hyperuricemia-related parameter. The gout-related or hyperuricemia-related parameter may include a blood urate measurement. In some embodiments, the gout-related or hyperuricemia-related parameter is decreased by about 2.5% or more, about 5% or more, or about 7.5% or more, as compared to prior to administration. In some embodiments, the gout-related or hyperuricemia-related parameter is decreased by about 10% or more, as compared to prior to administration. In some embodiments, the gout-related or hyperuricemia-related parameter is decreased by about 20% or more, about 30% or more, about 40% or more, about 50% or more, about 60% or more, about 70% or more, about 80% or more, about 90% or more, or about 95%, as compared to prior to administration. In some embodiments, the gout-related or hyperuricemia-related parameter is decreased by no more than about 2.5%, no more than about 5%, or no more than about 7.5%, as compared to prior to administration. In some embodiments, the gout-related or hyperuricemia-related parameter is decreased by no more than about 10%, as compared to prior to administration. In some embodiments, the gout-related or hyperuricemia-related parameter is decreased by no more than about 20%, no more than about 30%, no more than about 40%, no more than about 50%, no more than about 60%, no more than about 70%, no more than about 80%, no more than about 90%, or no more than about 95%, as compared to prior to administration. In some embodiments, the gout-related or hyperuricemia-related parameter is decreased by 2.5%, 5%, 7.5%, 10%, 15%, 20%, 25%, 30%, 35%, 40%, 45%, 50%, 55%, 60%, 65%, 70%, 75%, 80%, 85%, 90%, or 95%, or by a range defined by any of the two aforementioned percentages.

[0028] In some embodiments, the composition comprises an oligonucleotide that targets SOS2 and when administered to a subject in an effective amount decreases a cerebrovascular disease-related parameter. The cerebrovascular disease-related parameter may include a hypertension-related parameter. The hypertension-related parameter may include a systolic blood pressure measurement. The hypertension-related parameter may include a diastolic blood pressure measurement. The hypertension-related parameter may include a mean arterial pressure measurement. The hypertension-related parameter may include a pulse pressure measurement. In some embodiments, the hypertension-related parameter is decreased by about 2.5% or more, about 5% or more, or about 7.5% or more, as compared to prior to administration. In some embodiments, the hypertension-related parameter is decreased by about 10% or more, as compared to prior to administration. In some embodiments, the hypertension-related parameter is decreased by about 20% or more, about 30% or more, about 40% or more, about 50% or more, about 60% or more, about 70% or more, about 80% or more, about 90% or more, or about 95%, as compared to prior to administration. In some embodiments, the hypertension-related parameter is decreased by no more than about 2.5%, no more than about 5%, or no more than about 7.5%, as compared to prior to administration. In some embodiments, the hypertension-related parameter is decreased by no more than about 10%, as compared to prior to administration. In some embodiments, the hypertension-related parameter is decreased by no more than about 20%, no more than about 30%, no more than about 40%, no more than about 50%, no more than about 60%, no more than about 70%, no more than about 80%, no more than about 90%, or no more than about 95%, as compared to prior to administration. In some embodiments, the hypertension-related parameter is decreased by 2.5%, 5%, 7.5%, 10%, 15%, 20%, 25%, 30%, 35%, 40%, 45%, 50%, 55%, 60%, 65%, 70%, 75%, 80%, 85%, 90%, or 95%, or by a range defined by any of the two aforementioned percentages.

[0029] In some embodiments, the composition comprises an oligonucleotide that targets SOS2 and when administered to a subject in an effective amount decreases a glaucoma-related parameter such as an adverse glaucoma-related parameter. The glaucoma-related parameter may include a intraocular pressure measurement. The glaucoma-related parameter may include a cup-disc ratio. The glaucoma related parameter may include optic nerve head cupping. In some embodiments, the glaucoma-related parameter is decreased by about 2.5% or more, about 5% or more, or about 7.5% or more, as compared to prior to administration. In some embodiments, the glaucoma-related parameter is decreased by about 10% or more, as compared to prior to administration. In some embodiments, the glaucoma-related parameter is decreased by about 20% or more, about 30% or more, about 40% or more, about 50% or more, about 60% or more, about 70% or more, about 80% or more, about 90% or more, or about 95%, as compared to prior to administration. In some embodiments, the glaucoma-related parameter is decreased by no more than about 2.5%, no more than about 5%, or no more than about 7.5%, as compared to prior to administration. In some embodiments, the glaucoma-related parameter is decreased by no more than about 10%, as compared to prior to administration. In some embodiments, the glaucoma-related parameter is decreased by no more than about 20%, no more than about 30%, no more than about 40%, no more than about 50%, no more than about 60%, no more than about 70%, no more than about 80%, no more than about 90%, or no more than about 95%, as compared to prior to administration. In some embodiments, the glaucoma-related parameter is decreased by 2.5%, 5%, 7.5%, 10%, 15%, 20%, 25%, 30%, 35%, 40%, 45%, 50%, 55%, 60%, 65%, 70%, 75%, 80%, 85%, 90%, or 95%, or by a range defined by any of the two aforementioned percentages.

[0030] In some embodiments, the composition comprises an oligonucleotide that targets SOS2 and when administered to a subject in an effective amount increases a glaucoma-related parameter such as a protective or beneficial glaucoma-related parameter. The glaucoma-related parameter may include a retinal nerve fiber layer (RNFL) thickness. The glaucoma related parameter may include optic nerve head cupping. In some embodiments, the glaucoma-related parameter is increased by about 2.5% or more, about 5% or more, or about 7.5% or more, as compared to prior to administration. In some embodiments, the glaucoma-related parameter is increased by about 10% or more, as compared to prior to administration. In some embodiments, the glaucoma-related parameter is increased by about 20% or more, about 30% or more, about 40% or more, about 50% or more, about 60% or more, about 70% or more, about 80% or more, about 90% or more, or about 95%, as compared to prior to administration. In some embodiments, the glaucoma-related parameter is increased by about 200% or more, about 300% or more, about 400% or more, about 500% or more, about 600% or more, about 700% or more, about 800% or more, about 900% or more, or about 1000% or more, as compared to prior to administration. In some embodiments, the glaucoma-related parameter is increased by no more than about 2.5%, no more than about 5%, or no more than about 7.5%, as compared to prior to administration. In some embodiments, the glaucoma-related parameter is increased by no more than about 10%, as compared to prior to administration. In some embodiments, the glaucoma-related parameter is increased by no more than about 20%, no more than about 30%, no more than about 40%, no more than about 50%, no more than about 60%, no more than about 70%, no more than about 80%, no more than about 90%, or no more than about 95%, as compared to prior to administration. In some embodiments, the glaucoma-related parameter is increased by no more than about 200%, no more than about 300%, no more than about 400%, no more than about 500%, no more than about 600%, no more than about 700%, no more than about 800%, no more than about 900%, or no more than about 1000%, as compared to prior to administration. In some embodiments, the glaucoma-related parameter is increased by 2.5%, 5%, 7.5%, 10%, 15%, 20%, 25%, 30%, 35%, 40%, 45%, 50%, 55%, 60%, 65%, 70%, 75%, 80%, 85%, 90%, or 95%, or by a range defined by any of the two aforementioned percentages. In some embodiments, the glaucoma-related parameter is increased by 2.5%, 5%, 7.5%, 10%, 15%, 20%, 25%, 30%, 35%, 40%, 45%, 50%, 55%, 60%, 65%, 70%, 75%, 80%, 85%, 90%, 95%, 100%, 150%, 200%, 250%, 300%, 400%, 500%, 600%, 700%, 800%, 900%, or 1000%, or by a range defined by any of the two aforementioned percentages.

[0031] In some embodiments, the composition comprises an oligonucleotide that targets SOS2 and when administered to a subject in an effective amount decreases a macular degeneration/diabetic retinopathy-related parameter such as an adverse macular degeneration/diabetic retinopathy-related parameter. The macular degeneration/diabetic retinopathy-related parameter may comprise a macular degeneration-related parameter. The macular degeneration/diabetic retinopathy-related parameter may comprise a diabetic retinopathy-related parameter. The macular degeneration/diabetic retinopathy-related parameter may include a RPE pigmentation and reflectivity measurement. The macular degeneration/diabetic retinopathy-related parameter may include a drusen measurement. The macular degeneration/diabetic retinopathy-related parameter may include a macular hemorrhage measurement. The macular degeneration/diabetic retinopathy-related parameter may include a choroidal neovascularization measurement. The macular degeneration/diabetic retinopathy-related parameter may include a edema measurement. The macular degeneration/diabetic retinopathy-related parameter may include a microaneurysm measurement. The macular degeneration/diabetic retinopathy-related parameter may include a intraretinal hemorrhage measurement. The macular degeneration/diabetic retinopathy-related parameter may include a macular ischemia measurement. The macular degeneration/diabetic retinopathy-related parameter may include a neovascularization measurement. The macular degeneration/diabetic retinopathy-related parameter may include a vitreous hemorrhage measurement. The macular degeneration/diabetic retinopathy-related parameter may include a traction retinal detachment measurement. In some embodiments, the macular degeneration/diabetic retinopathy-related parameter is decreased by about 2.5% or more, about 5% or more, or about 7.5% or more, as compared to prior to administration. In some embodiments, the macular degeneration/diabetic retinopathy-related parameter is decreased by about 10% or more, as compared to prior to administration. In some embodiments, the a macular degeneration/diabetic retinopathy-related parameter is decreased by about 20% or more, about 30% or more, about 40% or more, about 50% or more, about 60% or more, about 70% or more, about 80% or more, about 90% or more, or about 95%, as compared to prior to administration. In some embodiments, the a macular degeneration/diabetic retinopathy-related parameter is decreased by no more than about 2.5%, no more than about 5%, or no more than about 7.5%, as compared to prior to administration. In some embodiments, the macular degeneration/diabetic retinopathy-related parameter is decreased by no more than about 10%, as compared to prior to administration. In some embodiments, the macular degeneration/diabetic retinopathy-related parameter is decreased by no more than about 20%, no more than about 30%, no more than about 40%, no more than about 50%, no more than about 60%, no more than about 70%, no more than about 80%, no more than about 90%, or no more than about 95%, as compared to prior to administration. In some embodiments, the a macular degeneration/diabetic retinopathy-related parameter is decreased by 2.5%, 5%, 7.5%, 10%, 15%, 20%, 25%, 30%, 35%, 40%, 45%, 50%, 55%, 60%, 65%, 70%, 75%, 80%, 85%, 90%, or 95%, or by a range defined by any of the two aforementioned percentages.

[0032] In some embodiments, the composition comprises an oligonucleotide that targets SOS2 and when administered to a subject in an effective amount increases a macular degeneration/diabetic retinopathy-related parameter such as a protective or beneficial macular degeneration/diabetic retinopathy-related parameter. The macular degeneration/diabetic retinopathy-related parameter may include a retinal thickness measurement. In some embodiments, the macular degeneration/diabetic retinopathy-related parameter is increased by about 2.5% or more, about 5% or more, or about 7.5% or more, as compared to prior to administration. In some embodiments, the macular degeneration/diabetic retinopathy-related parameter is increased by about 10% or more, as compared to prior to administration. In some embodiments, the a macular degeneration/diabetic retinopathy-related parameter is increased by about 20% or more, about 30% or more, about 40% or more, about 50% or more, about 60% or more, about 70% or more, about 80% or more, about 90% or more, or about 95%, as compared to prior to administration. In some embodiments, the a macular degeneration/diabetic retinopathy-related parameter is increased by no more than about 2.5%, no more than about 5%, or no more than about 7.5%, as compared to prior to administration. In some embodiments, the macular degeneration/diabetic retinopathy-related parameter is increased by no more than about 10%, as compared to prior to administration. In some embodiments, the macular degeneration/diabetic retinopathy-related parameter is increased by no more than about 20%, no more than about 30%, no more than about 40%, no more than about 50%, no more than about 60%, no more than about 70%, no more than about 80%, no more than about 90%, or no more than about 95%, as compared to prior to administration. In some embodiments, the macular degeneration/diabetic retinopathy-related parameter is increased by no more than about 200%, no more than about 300%, no more than about 400%, no more than about 500%, no more than about 600%, no more than about 700%, no more than about 800%, no more than about 900%, or no more than about 1000%, as compared to prior to administration. In some embodiments, the a macular degeneration/diabetic retinopathy-related parameter is increased by 2.5%, 5%, 7.5%, 10%, 15%, 20%, 25%, 30%, 35%, 40%, 45%, 50%, 55%, 60%, 65%, 70%, 75%, 80%, 85%, 90%, or 95%, or by a range defined by any of the two aforementioned percentages. In some embodiments, the macular degeneration/diabetic retinopathy-related parameter is increased by 2.5%, 5%, 7.5%, 10%, 15%, 20%, 25%, 30%, 35%, 40%, 45%, 50%, 55%, 60%, 65%, 70%, 75%, 80%, 85%, 90%, 95%, 100%, 150%, 200%, 250%, 300%, 400%, 500%, 600%, 700%, 800%, 900%, or 1000%, or by a range defined by any of the two aforementioned percentages.

[0033] In some embodiments, the composition comprises an oligonucleotide that targets SOS2 and when administered to a subject in an effective amount decreases a metabolic disorder-related parameter. In some embodiments, the metabolic disorder comprises obesity. In some embodiments, the metabolic disorder comprises hyperlipidemia. In some embodiments, the metabolic disorder comprises hypertriglyceridemia. In some embodiments, the metabolic disorder comprises metabolic syndrome. In some embodiments, the metabolic disorder comprises diabetes. In some embodiments, the diabetes comprises type II diabetes. The metabolic disorder-related parameter may include a hemoglobin A1C measurement. The metabolic disorder-related parameter may include a body mass index (BMI) measurement. The metabolic disorder-related parameter may include a body weight measurement. The metabolic disorder-related parameter may include a waist circumference measurement. The metabolic disorder-related parameter may include a hip circumference measurement. The metabolic disorder-related parameter may comprise a waist-hip ratio (WHR). The metabolic disorder-related parameter may comprise a body fat percentage. The metabolic disorder-related parameter may comprise a blood glucose measurement. The metabolic disorder-related parameter may comprise a glucose tolerance measurement. The metabolic disorder-related parameter may comprise a insulin sensitivity measurement. The metabolic disorder-related parameter may comprise a blood triglyceride measurement. The metabolic disorder-related parameter may comprise a non-HDL cholesterol measurement. In some embodiments, the metabolic disorder-related parameter is decreased by about 2.5% or more, about 5% or more, or about 7.5% or more, as compared to prior to administration. In some embodiments, the metabolic disorder-related parameter is decreased by about 10% or more, as compared to prior to administration. In some embodiments, the metabolic disorder-related parameter is decreased by about 20% or more, about 30% or more, about 40% or more, about 50% or more, about 60% or more, about 70% or more, about 80% or more, about 90% or more, or about 95%, as compared to prior to administration. In some embodiments, the metabolic disorder-related parameter is decreased by no more than about 2.5%, no more than about 5%, or no more than about 7.5%, as compared to prior to administration. In some embodiments, the metabolic disorder-related parameter is decreased by no more than about 10%, as compared to prior to administration. In some embodiments, the metabolic disorder-related parameter is decreased by no more than about 20%, no more than about 30%, no more than about 40%, no more than about 50%, no more than about 60%, no more than about 70%, no more than about 80%, no more than about 90%, or no more than about 95%, as compared to prior to administration. In some embodiments, the metabolic disorder-related parameter is decreased by 2.5%, 5%, 7.5%, 10%, 15%, 20%, 25%, 30%, 35%, 40%, 45%, 50%, 55%, 60%, 65%, 70%, 75%, 80%, 85%, 90%, or 95%, or by a range defined by any of the two aforementioned percentages.

[0034] In some embodiments, the composition comprises an oligonucleotide that targets SOS2 and when administered to a subject in an effective amount decreases a liver disease-related parameter. In some embodiments, the liver disease comprises fibrotic liver disease. In some embodiments, the liver disease comprises liver fibrosis. In some embodiments, the liver disease comprises cirrhosis. In some embodiments, the liver disease comprises non-alcoholic fatty liver disease (NAFLD). The liver disease-related parameter may include an aspartate aminotransferase (AST) measurement. The liver disease-related parameter may include an alanine aminotransferase (ALT) measurement. The liver disease-related parameter may include an AST/ALT ratio. The liver disease-related parameter may include a liver fat percentage measurement. The liver disease-related parameter may include a liver fibrosis score. The liver disease-related parameter may include a NAFLD activity score. The liver disease-related parameter may include a blood gamma-glutamyl transferase (GGT) measurement. In some embodiments, the liver disease-related parameter is decreased by about 2.5% or more, about 5% or more, or about 7.5% or more, as compared to prior to administration. In some embodiments, the liver disease-related parameter is decreased by about 10% or more, as compared to prior to administration. In some embodiments, the liver disease-related parameter is decreased by about 20% or more, about 30% or more, about 40% or more, about 50% or more, about 60% or more, about 70% or more, about 80% or more, about 90% or more, or about 95%, as compared to prior to administration. In some embodiments, the liver disease-related parameter is decreased by no more than about 2.5%, no more than about 5%, or no more than about 7.5%, as compared to prior to administration. In some embodiments, the liver disease-related parameter is decreased by no more than about 10%, as compared to prior to administration. In some embodiments, the liver disease-related parameter is decreased by no more than about 20%, no more than about 30%, no more than about 40%, no more than about 50%, no more than about 60%, no more than about 70%, no more than about 80%, no more than about 90%, or no more than about 95%, as compared to prior to administration. In some embodiments, the liver disease-related parameter is decreased by 2.5%, 5%, 7.5%, 10%, 15%, 20%, 25%, 30%, 35%, 40%, 45%, 50%, 55%, 60%, 65%, 70%, 75%, 80%, 85%, 90%, or 95%, or by a range defined by any of the two aforementioned percentages.

[0035] In some embodiments, the composition comprises an oligonucleotide that targets SOS2 and when administered to a subject in an effective amount decreases a hair loss-related parameter. In some embodiments, the hair loss comprises androgenetic alopecia. The hair loss-related parameter may include a hair count measurement. The hair loss-related parameter may include a hair thickness measurement. The hair loss-related parameter may include a hair density measurement. In some embodiments, the hair loss-related parameter is decreased by about 2.5% or more, about 5% or more, or about 7.5% or more, as compared to prior to administration. In some embodiments, the hair loss-related parameter is decreased by about 10% or more, as compared to prior to administration. In some embodiments, the hair loss-related parameter is decreased by about 20% or more, about 30% or more, about 40% or more, about 50% or more, about 60% or more, about 70% or more, about 80% or more, about 90% or more, or about 95%, as compared to prior to administration. In some embodiments, the hair loss-related parameter is decreased by no more than about 2.5%, no more than about 5%, or no more than about 7.5%, as compared to prior to administration. In some embodiments, the hair loss-related parameter is decreased by no more than about 10%, as compared to prior to administration. In some embodiments, the hair loss-related parameter is decreased by no more than about 20%, no more than about 30%, no more than about 40%, no more than about 50%, no more than about 60%, no more than about 70%, no more than about 80%, no more than about 90%, or no more than about 95%, as compared to prior to administration. In some embodiments, the hair loss-related parameter is decreased by 2.5%, 5%, 7.5%, 10%, 15%, 20%, 25%, 30%, 35%, 40%, 45%, 50%, 55%, 60%, 65%, 70%, 75%, 80%, 85%, 90%, or 95%, or by a range defined by any of the two aforementioned percentages.

### A. siRNAs

[0036] In some embodiments, the composition comprises an oligonucleotide that targets SOS Ras/Rho guanine nucleotide exchange factor 2 (SOS2), wherein the oligonucleotide comprises a small interfering RNA (siRNA). In some embodiments, the composition comprises an oligonucleotide that targets SOS2, wherein the oligonucleotide comprises a small interfering RNA (siRNA) comprising a sense strand and an antisense strand.

[0037] In some embodiments, the composition comprises an oligonucleotide that inhibits the expression of SOS2, wherein the oligonucleotide comprises an siRNA comprising a sense strand and an antisense strand, wherein the sense strand is 14-30 nucleosides in length. In some embodiments, the composition comprises a sense strange that is at least about 10, 11, 12, 13, 14, 15, 16, 17, 18, 19, 20, 21, 22, 23, 24, 25, 26, 27, 28, 29, or 30 nucleosides in length, or a range defined by any of the two aforementioned numbers. In some embodiments, the composition comprises an antisense strand is 14-30 nucleosides in length. In some embodiments, the composition comprises an antisense strange that is at least about 10, 11, 12, 13, 14, 15, 16, 17, 18, 19, 20, 21, 22, 23, 24, 25, 26, 27, 28, 29, or 30 nucleosides in length, or a range defined by any of the two aforementioned numbers.

[0038] In some embodiments, the composition comprises an oligonucleotide that inhibits the expression of SOS2, wherein the oligonucleotide comprises an siRNA comprising a sense strand and an antisense strand, each strand is independently about 14-30 nucleosides in length, and at least one of the sense strand and the antisense strand comprises a nucleoside sequence comprising about 14-30 contiguous nucleosides of a full-length human SOS2 mRNA sequence such as SEQ ID NO: 11253. In some embodiments, at least one of the sense strand and the antisense strand comprise a nucleoside sequence comprising at least about 10, 11, 12, 13, 14, 15, 16, 17, 18, 19, 20, 21, 22, 23, 24, 25, 26, 27, 28, 29, 30, or more contiguous nucleosides of one of SEQ ID NO: 11253.

[0039] In some embodiments, the composition comprises an oligonucleotide that inhibits the expression of SOS2, wherein the oligonucleotide comprises an siRNA comprising a sense strand and an antisense strand, wherein the sense strand and the antisense strand form a double-stranded RNA duplex. In some embodiments, the first base pair of the double-stranded RNA duplex is an AU base pair.

[0040] In some embodiments, the sense strand further comprises a 3′ overhang. In some embodiments, the 3′ overhang comprises 1, 2, 3, 4, 5, 6, 7, 8, 9, or 10 nucleosides, or a range of nucleotides defined by any two of the aforementioned numbers. In some embodiments, the 3′ overhang comprises 1, 2, or more nucleosides. In some embodiments, the 3′ overhang comprises 2 nucleosides. In some embodiments, the sense strand further comprises a 5′ overhang. In some embodiments, the 5′ overhang comprises 1, 2, 3, 4, 5, 6, 7, 8, 9, or 10 nucleosides, or a range of nucleotides defined by any two of the aforementioned numbers. In some embodiments, the 5′ overhang comprises 1, 2, or more nucleosides. In some embodiments, the 5′ overhang comprises 2 nucleosides.

[0041] In some embodiments, the antisense strand further comprises a 3′ overhang. In some embodiments, the 3′ overhang comprises 1, 2, 3, 4, 5, 6, 7, 8, 9, or 10 nucleosides, or a range of nucleotides defined by any two of the aforementioned numbers. In some embodiments, the 3′ overhang comprises 1, 2, or more nucleosides. In some embodiments, the 3′ overhang comprises 2 nucleosides. In some embodiments, the antisense strand further comprises a 5′ overhang. In some embodiments, the 5′ overhang comprises 1, 2, 3, 4, 5, 6, 7, 8, 9, or 10 nucleosides, or a range of nucleotides defined by any two of the aforementioned numbers. In some embodiments, the 5′ overhang comprises 1, 2, or more nucleosides. In some embodiments, the 5′ overhang comprises 2 nucleosides.

[0042] In some embodiments, the composition comprises an oligonucleotide that inhibits the expression of SOS2, wherein the oligonucleotide comprises an siRNA comprising a sense strand and an antisense strand, wherein the siRNA binds with a 19mer in a human SOS2 mRNA. In some embodiments, the siRNA binds with a 12mer, a 13mer, a 14mer, a 15mer, a 16mer, a 17mer, a 18mer, a 19mer, a 20mer, a 21mer, a 22mer, a 23mer, a 24mer, or a 25mer in a human SOS2 mRNA.

[0043] In some embodiments, the composition comprises an oligonucleotide that inhibits the expression of SOS2, wherein the oligonucleotide comprises an siRNA comprising a sense strand and an antisense strand, wherein the siRNA binds with a 17mer in a non-human primate SOS2 mRNA. In some embodiments, the siRNA binds with a 12mer, a 13mer, a 14mer, a 15mer, a 16mer, a 17mer, a 18mer, a 19mer, a 20mer, a 21mer, a 22mer, a 23mer, a 24mer, or a 25mer in a non-human primate SOS2 mRNA.

[0044] In some embodiments, the composition comprises an oligonucleotide that inhibits the expression of SOS2, wherein the oligonucleotide comprises an siRNA comprising a sense strand and an antisense strand, wherein the siRNA binds with a 19mer in a human SOS2 mRNA, or a combination thereof. In some embodiments, the siRNA binds with a 12mer, a 13mer, a 14mer, a 15mer, a 16mer, a 17mer, and 18mer, a 19mer, a 20mer, a 21mer, a 22mer, a 23mer, a 24mer, or a 25mer in a human SOS2 mRNA.

[0045] In some embodiments, the composition comprises an oligonucleotide that inhibits the expression of SOS2, wherein the oligonucleotide comprises an siRNA comprising a sense strand and an antisense strand, wherein the siRNA binds with a human SOS2 mRNA and less than or equal to 20 human off-targets, with no more than 2 mismatches in the antisense strand. In some embodiments, the siRNA binds with a human SOS2 mRNA and less than or equal to 10 human off-targets, with no more than 2 mismatches in the antisense strand. In some embodiments, the siRNA binds with a human SOS2 mRNA and less than or equal to 30 human off-targets, with no more than 2 mismatches in the antisense strand. In some embodiments, the siRNA binds with a human SOS2 mRNA and less than or equal to 40 human off-targets, with no more than 2 mismatches in the antisense strand. In some embodiments, the siRNA binds with a human SOS2 mRNA and less than or equal to 50 human off-targets, with no more than 2 mismatches in the antisense strand. In some embodiments, the siRNA binds with a human SOS2 mRNA and less than or equal to 10 human off-targets, with no more than 3 mismatches in the antisense strand. In some embodiments, the siRNA binds with a human SOS2 mRNA and less than or equal to 20 human off-targets, with no more than 3 mismatches in the antisense strand. In some embodiments, the siRNA binds with a human SOS2 mRNA and less than or equal to 30 human off-targets, with no more than 3 mismatches in the antisense strand. In some embodiments, the siRNA binds with a human SOS2 mRNA and less than or equal to 40 human off-targets, with no more than 3 mismatches in the antisense strand. In some embodiments, the siRNA binds with a human SOS2 mRNA and less than or equal to 50 human off-targets, with no more than 3 mismatches in the antisense strand.

[0046] In some embodiments, the composition comprises an oligonucleotide that inhibits the expression of SOS2, wherein the oligonucleotide comprises an siRNA comprising a sense strand and an antisense strand, siRNA binds with a human SOS2 mRNA target site that does not harbor an SNP, with a minor allele frequency (MAF) greater or equal to 1% (pos. 2-18). In some embodiments, the MAF is greater or equal to about 2%, about 3%, about 4%, about 5%, about 6%, about 7%, about 8%, about 9%, about 10%, about 11%, about 12%, about 13%, about 14%, about 15%, about 16%, about 17%, about 18%, about 19%, or about 20%.

[0047] In some embodiments, the siRNA comprises a sense strand having a sequence in accordance with any of SEQ ID NOs: 1-5490. In some embodiments, the sense strand sequence comprises or consists of sequence at least 75% identical to any one of SEQ ID NOs: 1-5490, at least 80% identical to any one of SEQ ID NOs: 1-5490, at least 85% identical to of any one of SEQ ID NOs: 1-5490, at least 90% identical to any one of SEQ ID NOs: 1-5490, or at least 95% identical to any one of SEQ ID NOs: 1-5490. In some embodiments, the sense strand sequence comprises or consists of the sequence of any one of SEQ ID NOs: 1-5490, or a sense strand sequence thereof having 1, 2, 3, or 4 nucleoside substitutions, additions, or deletions. In some embodiments, the sense strand sequence comprises or consists of the sequence of any one of SEQ ID NOs: 1-5490, or a sense strand sequence thereof having 1 or 2 nucleoside substitutions, additions, or deletions. In some embodiments, the sense strand sequence comprises or consists of a sequence 100% identical to SEQ ID NOs: 1-5490. The sense strand may comprise a modification pattern described herein. The sense strand may comprise a lipid moiety. The sense strand may comprise a GalNAc moiety.

[0048] In some embodiments, the siRNA comprises an antisense strand having a sequence in accordance with any of SEQ ID NOs: 5491-10980. In some embodiments, the antisense strand sequence comprises or consists of sequence at least 75% identical to any one of SEQ ID NOs: 5491-10980, at least 80% identical to any one of SEQ ID NOs: 5491-10980, at least 85% identical to of any one of SEQ ID NOs: 5491-10980, at least 90% identical to any one of SEQ ID NOs: 5491-10980, or at least 95% identical to any one of SEQ ID NOs: 5491-10980. In some embodiments, the antisense strand sequence comprises or consists of the sequence of any one of SEQ ID NOs: 5491-10980, or an antisense strand sequence thereof having 1, 2, 3, or 4 nucleoside substitutions, additions, or deletions. In some embodiments, the antisense strand sequence comprises or consists of the sequence of any one of SEQ ID NOs: 5491-10980, or an antisense strand sequence thereof having 1 or 2 nucleoside substitutions, additions, or deletions. In some embodiments, the antisense strand sequence comprises or consists of a sequence 100% identical to SEQ ID NOs: 5491-10980. The antisense strand may comprise a modification pattern described herein.

[0049] In some embodiments, the siRNA comprises a sense strand or antisense strand having a sequence in accordance with the sense strand or antisense strand sequence of an siRNA of subset A. In some embodiments, the sense strand or antisense strand comprises a sequence at least 75% identical, at least 80% identical, at least 85% identical, at least 90% identical, or at least 95% identical, to a sense strand or antisense strand sequence of subset A. In some embodiments, the sense strand or antisense strand comprises a sequence of a sense or antisense strand of subset A, or a sequence thereof having 3 or 4 nucleoside substitutions, additions, or deletions. In some embodiments, the sense strand or antisense strand comprises a sequence of a sense or antisense strand of subset A, or a sequence thereof having 1 or 2 nucleoside substitutions, additions, or deletions. In some embodiments, the sense strand or antisense sequence comprises or consists of a sequence 100% identical to a sense strand or antisense strand sequence of subset A. The sense strand or antisense strand may comprise any modifications described herein. The sense strand or antisense strand may comprise a lipid moiety or a GalNAc moiety.

[0050] In some embodiments, the siRNA comprises a sense strand or antisense strand having a sequence in accordance with the sense strand or antisense strand sequence of an siRNA of subset B. In some embodiments, the sense strand or antisense strand comprises a sequence at least 75% identical, at least 80% identical, at least 85% identical, at least 90% identical, or at least 95% identical, to a sense strand or antisense strand sequence of subset B. In some embodiments, the sense strand or antisense strand comprises a sequence of a sense or antisense strand of subset B, or a sequence thereof having 3 or 4 nucleoside substitutions, additions, or deletions. In some embodiments, the sense strand or antisense strand comprises a sequence of a sense or antisense strand of subset B, or a sequence thereof having 1 or 2 nucleoside substitutions, additions, or deletions. In some embodiments, the sense strand or antisense sequence comprises or consists of a sequence 100% identical to a sense strand or antisense strand sequence of subset B. The sense strand or antisense strand may comprise any modifications described herein. The sense strand or antisense strand may comprise a lipid moiety or a GalNAc moiety.

[0051] In some embodiments, the siRNA comprises a sense strand or antisense strand having a sequence in accordance with the sense strand or antisense strand sequence of an siRNA of subset C. In some embodiments, the sense strand or antisense strand comprises a sequence at least 75% identical, at least 80% identical, at least 85% identical, at least 90% identical, or at least 95% identical, to a sense strand or antisense strand sequence of subset C. In some embodiments, the sense strand or antisense strand comprises a sequence of a sense or antisense strand of subset C, or a sequence thereof having 3 or 4 nucleoside substitutions, additions, or deletions. In some embodiments, the sense strand or antisense strand comprises a sequence of a sense or antisense strand of subset C, or a sequence thereof having 1 or 2 nucleoside substitutions, additions, or deletions. In some embodiments, the sense strand or antisense sequence comprises or consists of a sequence 100% identical to a sense strand or antisense strand sequence of subset C. The sense strand or antisense strand may comprise any modifications described herein. The sense strand or antisense strand may comprise a lipid moiety or a GalNAc moiety.

[0052] In some embodiments, the siRNA comprises a sense strand or antisense strand having a sequence in accordance with the sense strand or antisense strand sequence of an siRNA of subset D. In some embodiments, the sense strand or antisense strand comprises a sequence at least 750% identical, at least 80% identical, at least 85% identical, at least 90% identical, or at least 95% identical, to a sense strand or antisense strand sequence of subset D. In some embodiments, the sense strand or antisense strand comprises a sequence of a sense or antisense strand of subset D, or a sequence thereof having 3 or 4 nucleoside substitutions, additions, or deletions. In some embodiments, the sense strand or antisense strand comprises a sequence of a sense or antisense strand of subset D, or a sequence thereof having 1 or 2 nucleoside substitutions, additions, or deletions. In some embodiments, the sense strand or antisense sequence comprises or consists of a sequence 100% identical to a sense strand or antisense strand sequence of subset D. The sense strand or antisense strand may comprise any modifications described herein. The sense strand or antisense strand may comprise a lipid moiety or a GalNAc moiety.

[0053] In some embodiments, the siRNA comprises a sense strand or antisense strand having a sequence in accordance with the sense strand or antisense strand sequence of an siRNA of subset E. In some embodiments, the sense strand or antisense strand comprises a sequence at least 75% identical, at least 80% identical, at least 85% identical, at least 90% identical, or at least 95% identical, to a sense strand or antisense strand sequence of subset E. In some embodiments, the sense strand or antisense strand comprises a sequence of a sense or antisense strand of subset E, or a sequence thereof having 3 or 4 nucleoside substitutions, additions, or deletions. In some embodiments, the sense strand or antisense strand comprises a sequence of a sense or antisense strand of subset E, or a sequence thereof having 1 or 2 nucleoside substitutions, additions, or deletions. In some embodiments, the sense strand or antisense sequence comprises or consists of a sequence 100% identical to a sense strand or antisense strand sequence of subset E. The sense strand or antisense strand may comprise any modifications described herein. The sense strand or antisense strand may comprise a lipid moiety or a GalNAc moiety.

[0054] In some embodiments, the siRNA comprises a sense strand or antisense strand having a sequence in accordance with the sense strand or antisense strand sequence of an siRNA of subset F. In some embodiments, the sense strand or antisense strand comprises a sequence at least 75% identical, at least 80% identical, at least 85% identical, at least 90% identical, or at least 95% identical, to a sense strand or antisense strand sequence of subset F. In some embodiments, the sense strand or antisense strand comprises a sequence of a sense or antisense strand of subset F, or a sequence thereof having 3 or 4 nucleoside substitutions, additions, or deletions. In some embodiments, the sense strand or antisense strand comprises a sequence of a sense or antisense strand of subset F, or a sequence thereof having 1 or 2 nucleoside substitutions, additions, or deletions. In some embodiments, the sense strand or antisense sequence comprises or consists of a sequence 100% identical to a sense strand or antisense strand sequence of subset F. The sense strand or antisense strand may comprise any modifications described herein. The sense strand or antisense strand may comprise a lipid moiety or a GalNAc moiety.

[0055] In some embodiments, the siRNA comprises a sense strand or antisense strand having a sequence in accordance with the sense strand or antisense strand sequence of an siRNA of subset G. In some embodiments, the sense strand or antisense strand comprises a sequence at least 75% identical, at least 80% identical, at least 85% identical, at least 90% identical, or at least 95% identical, to a sense strand or antisense strand sequence of subset G. In some embodiments, the sense strand or antisense strand comprises a sequence of a sense or antisense strand of subset G, or a sequence thereof having 3 or 4 nucleoside substitutions, additions, or deletions. In some embodiments, the sense strand or antisense strand comprises a sequence of a sense or antisense strand of subset G, or a sequence thereof having 1 or 2 nucleoside substitutions, additions, or deletions. In some embodiments, the sense strand or antisense sequence comprises or consists of a sequence 100% identical to a sense strand or antisense strand sequence of subset G. The sense strand or antisense strand may comprise any modifications described herein. The sense strand or antisense strand may comprise a lipid moiety or a GalNAc moiety.

[0056] In some embodiments, the siRNA comprises a sense strand or antisense strand having a sequence in accordance with the sense strand or antisense strand sequence of an siRNA of subset H. In some embodiments, the sense strand or antisense strand comprises a sequence at least 75% identical, at least 80% identical, at least 85% identical, at least 90% identical, or at least 95% identical, to a sense strand or antisense strand sequence of subset H. In some embodiments, the sense strand or antisense strand comprises a sequence of a sense or antisense strand of subset H, or a sequence thereof having 3 or 4 nucleoside substitutions, additions, or deletions. In some embodiments, the sense strand or antisense strand comprises a sequence of a sense or antisense strand of subset H, or a sequence thereof having 1 or 2 nucleoside substitutions, additions, or deletions. In some embodiments, the sense strand or antisense sequence comprises or consists of a sequence 100% identical to a sense strand or antisense strand sequence of subset H. The sense strand or antisense strand may comprise any modifications described herein. The sense strand or antisense strand may comprise a lipid moiety or a GalNAc moiety.

[0057] In some embodiments, the siRNA comprises a sense strand or antisense strand having a sequence in accordance with the sense strand or antisense strand sequence of an siRNA of subset I. In some embodiments, the sense strand or antisense strand comprises a sequence at least 750% identical, at least 80% identical, at least 85% identical, at least 90% identical, or at least 95% identical, to a sense strand or antisense strand sequence of subset I. In some embodiments, the sense strand or antisense strand comprises a sequence of a sense or antisense strand of subset I, or a sequence thereof having 3 or 4 nucleoside substitutions, additions, or deletions. In some embodiments, the sense strand or antisense strand comprises a sequence of a sense or antisense strand of subset I, or a sequence thereof having 1 or 2 nucleoside substitutions, additions, or deletions. In some embodiments, the sense strand or antisense sequence comprises or consists of a sequence 100% identical to a sense strand or antisense strand sequence of subset I. The sense strand or antisense strand may comprise any modifications described herein. The sense strand or antisense strand may comprise a lipid moiety or a GalNAc moiety.

[0058] In some embodiments, the siRNA comprises a sense strand or antisense strand having a sequence in accordance with the sense strand or antisense strand sequence of an siRNA of subset J. In some embodiments, the sense strand or antisense strand comprises a sequence at least 75% identical, at least 80% identical, at least 85% identical, at least 90% identical, or at least 95% identical, to a sense strand or antisense strand sequence of subset J. In some embodiments, the sense strand or antisense strand comprises a sequence of a sense or antisense strand of subset J, or a sequence thereof having 3 or 4 nucleoside substitutions, additions, or deletions. In some embodiments, the sense strand or antisense strand comprises a sequence of a sense or antisense strand of subset J, or a sequence thereof having 1 or 2 nucleoside substitutions, additions, or deletions. In some embodiments, the sense strand or antisense sequence comprises or consists of a sequence 100% identical to a sense strand or antisense strand sequence of subset J. The sense strand or antisense strand may comprise any modifications described herein. The sense strand or antisense strand may comprise a lipid moiety or a GalNAc moiety.

[0059] In some embodiments, the siRNA comprises a sense strand or antisense strand having a sequence in accordance with the sense strand or antisense strand sequence of an siRNA of subset K. In some embodiments, the sense strand or antisense strand comprises a sequence at least 75% identical, at least 80% identical, at least 85% identical, at least 90% identical, or at least 95% identical, to a sense strand or antisense strand sequence of subset K. In some embodiments, the sense strand or antisense strand comprises a sequence of a sense or antisense strand of subset K, or a sequence thereof having 3 or 4 nucleoside substitutions, additions, or deletions. In some embodiments, the sense strand or antisense strand comprises a sequence of a sense or antisense strand of subset K, or a sequence thereof having 1 or 2 nucleoside substitutions, additions, or deletions. In some embodiments, the sense strand or antisense sequence comprises or consists of a sequence 100% identical to a sense strand or antisense strand sequence of subset K. The sense strand or antisense strand may comprise any modifications described herein. The sense strand or antisense strand may comprise a lipid moiety or a GalNAc moiety.

[0060] In some embodiments, the siRNA comprises a sense strand or antisense strand having a sequence in accordance with the sense strand or antisense strand sequence of an siRNA in Table 28. In some embodiments, the sense strand or antisense strand comprises a sequence at least 750% identical, at least 80% identical, at least 85% identical, at least 90% identical, or at least 95% identical, to a sense strand or antisense strand sequence in Table 28. In some embodiments, the sense strand or antisense strand comprises a sequence of a sense or antisense strand in Table 28, or a sequence thereof having 3 or 4 nucleoside substitutions, additions, or deletions. In some embodiments, the sense strand or antisense strand comprises a sequence of a sense or antisense strand in Table 28, or a sequence thereof having 1 or 2 nucleoside substitutions, additions, or deletions. In some embodiments, the sense strand or antisense sequence comprises or consists of a sequence 100% identical to a sense strand or antisense strand sequence in Table 28. The sense strand or antisense strand may comprise any modifications described herein. The sense strand or antisense strand may comprise a lipid moiety or a GalNAc moiety.

[0061] In some embodiments, the siRNA comprises a sense strand or antisense strand having a sequence in accordance with the sense strand or antisense strand sequence of an siRNA in Table 32. In some embodiments, the sense strand or antisense strand comprises a sequence at least 75% identical, at least 80% identical, at least 85% identical, at least 90% identical, or at least 95% identical, to a sense strand or antisense strand sequence in Table 32. In some embodiments, the sense strand or antisense strand comprises a sequence of a sense or antisense strand in Table 32, or a sequence thereof having 3 or 4 nucleoside substitutions, additions, or deletions. In some embodiments, the sense strand or antisense strand comprises a sequence of a sense or antisense strand in Table 32, or a sequence thereof having 1 or 2 nucleoside substitutions, additions, or deletions. In some embodiments, the sense strand or antisense sequence comprises or consists of a sequence 100% identical to a sense strand or antisense strand sequence in Table 32. The sense strand or antisense strand may comprise any modifications described herein. The sense strand or antisense strand may comprise a lipid moiety or a GalNAc moiety.

[0062] In some embodiments, the siRNA comprises a sense strand having a sequence in accordance with any of SEQ ID NOs: 743, 744, 1036, 1056, 1178, 1521, 2148, 2151, 2152, 2158, 2619, 2882, 2883, 2884, 3042, 3305, 3969, 4216, 4305 or 4309. In some embodiments, the sense strand sequence comprises or consists of sequence at least 75% identical to any one of SEQ ID NOs: 743, 744, 1036, 1056, 1178, 1521, 2148, 2151, 2152, 2158, 2619, 2882, 2883, 2884, 3042, 3305, 3969, 4216, 4305 or 4309, at least 80% identical to any one of SEQ ID NOs: 743, 744, 1036, 1056, 1178, 1521, 2148, 2151, 2152, 2158, 2619, 2882, 2883, 2884, 3042, 3305, 3969, 4216, 4305 or 4309, at least 85% identical to of any one of SEQ ID NOs: 743, 744, 1036, 1056, 1178, 1521, 2148, 2151, 2152, 2158, 2619, 2882, 2883, 2884, 3042, 3305, 3969, 4216, 4305 or 4309, at least 90% identical to any one of SEQ ID NOs: 743, 744, 1036, 1056, 1178, 1521, 2148, 2151, 2152, 2158, 2619, 2882, 2883, 2884, 3042, 3305, 3969, 4216, 4305 or 4309, or at least 95% identical to any one of SEQ ID NOs: 743, 744, 1036, 1056, 1178, 1521, 2148, 2151, 2152, 2158, 2619, 2882, 2883, 2884, 3042, 3305, 3969, 4216, 4305 or 4309. In some embodiments, the sense strand sequence comprises or consists of the sequence of any one of SEQ ID NOs: 743, 744, 1036, 1056, 1178, 1521, 2148, 2151, 2152, 2158, 2619, 2882, 2883, 2884, 3042, 3305, 3969, 4216, 4305 or 4309, or a sense strand sequence thereof having 1, 2, 3, or 4 nucleoside substitutions, additions, or deletions. In some embodiments, the sense strand sequence comprises or consists of the sequence of any one of SEQ ID NOs: 743, 744, 1036, 1056, 1178, 1521, 2148, 2151, 2152, 2158, 2619, 2882, 2883, 2884, 3042, 3305, 3969, 4216, 4305 or 4309, or a sense strand sequence thereof having 1 or 2 nucleoside substitutions, additions, or deletions. In some embodiments, the sense strand sequence comprises or consists of a sequence 100% identical to SEQ ID NOs: 743, 744, 1036, 1056, 1178, 1521, 2148, 2151, 2152, 2158, 2619, 2882, 2883, 2884, 3042, 3305, 3969, 4216, 4305 or 4309. The sense strand may comprise a modification pattern described herein. The sense strand may comprise a lipid moiety. The sense strand may comprise a GalNAc moiety.

[0063] In some embodiments, the siRNA comprises an antisense strand having a sequence in accordance with any of SEQ ID NOs: 6233, 6234, 6526, 6546, 6668, 7011, 7638, 7641, 7642, 7648, 8109, 8372, 8373, 8374, 8532, 8795, 9459, 9706, 9795, or 9799. In some embodiments, the antisense strand sequence comprises or consists of sequence at least 75% identical to any one of SEQ ID NOs: 6233, 6234, 6526, 6546, 6668, 7011, 7638, 7641, 7642, 7648, 8109, 8372, 8373, 8374, 8532, 8795, 9459, 9706, 9795, or 9799, at least 80% identical to any one of SEQ ID NOs: 6233, 6234, 6526, 6546, 6668, 7011, 7638, 7641, 7642, 7648, 8109, 8372, 8373, 8374, 8532, 8795, 9459, 9706, 9795, or 9799, at least 85% identical to of any one of SEQ ID NOs: 6233, 6234, 6526, 6546, 6668, 7011, 7638, 7641, 7642, 7648, 8109, 8372, 8373, 8374, 8532, 8795, 9459, 9706, 9795, or 9799, at least 90% identical to any one of SEQ ID NOs: 6233, 6234, 6526, 6546, 6668, 7011, 7638, 7641, 7642, 7648, 8109, 8372, 8373, 8374, 8532, 8795, 9459, 9706, 9795, or 9799, or at least 95% identical to any one of SEQ ID NOs: 6233, 6234, 6526, 6546, 6668, 7011, 7638, 7641, 7642, 7648, 8109, 8372, 8373, 8374, 8532, 8795, 9459, 9706, 9795, or 9799. In some embodiments, the antisense strand sequence comprises or consists of the sequence of any one of SEQ ID NOs: 6233, 6234, 6526, 6546, 6668, 7011, 7638, 7641, 7642, 7648, 8109, 8372, 8373, 8374, 8532, 8795, 9459, 9706, 9795, or 9799, or an antisense strand sequence thereof having 1, 2, 3, or 4 nucleoside substitutions, additions, or deletions. In some embodiments, the antisense strand sequence comprises or consists of the sequence of any one of SEQ ID NOs: 6233, 6234, 6526, 6546, 6668, 7011, 7638, 7641, 7642, 7648, 8109, 8372, 8373, 8374, 8532, 8795, 9459, 9706, 9795, or 9799, or an antisense strand sequence thereof having 1 or 2 nucleoside substitutions, additions, or deletions. In some embodiments, the antisense strand sequence comprises or consists of a sequence 100% identical to SEQ ID NOs: 6233, 6234, 6526, 6546, 6668, 7011, 7638, 7641, 7642, 7648, 8109, 8372, 8373, 8374, 8532, 8795, 9459, 9706, 9795, or 9799. The antisense strand may comprise a modification pattern described herein. The antisense strand may comprise a lipid moiety. The antisense strand may comprise a GalNAc moiety.

[0064] In some embodiments, the siRNA comprises a sense strand having a sequence in accordance with any of SEQ ID NOs: 888, 1683, 1684, 1912, 1922, 1927, 1938, 2014, 2167, 2213, 2362, 2364, 2365, 2598, 2631, 2759, 2890, 3231, 3259, 3333, 3487, 3491, 3586, 3587, or 3756. In some embodiments, the sense strand sequence comprises or consists of sequence at least 75% identical to any one of SEQ ID NOs: 888, 1683, 1684, 1912, 1922, 1927, 1938, 2014, 2167, 2213, 2362, 2364, 2365, 2598, 2631, 2759, 2890, 3231, 3259, 3333, 3487, 3491, 3586, 3587, or 3756, at least 80% identical to any one of SEQ ID NOs: 888, 1683, 1684, 1912, 1922, 1927, 1938, 2014, 2167, 2213, 2362, 2364, 2365, 2598, 2631, 2759, 2890, 3231, 3259, 3333, 3487, 3491, 3586, 3587, or 3756, at least 85% identical to of any one of SEQ ID NOs: 888, 1683, 1684, 1912, 1922, 1927, 1938, 2014, 2167, 2213, 2362, 2364, 2365, 2598, 2631, 2759, 2890, 3231, 3259, 3333, 3487, 3491, 3586, 3587, or 3756, at least 90% identical to any one of SEQ ID NOs: 1-5490, or at least 95% identical to any one of SEQ ID NOs: 888, 1683, 1684, 1912, 1922, 1927, 1938, 2014, 2167, 2213, 2362, 2364, 2365, 2598, 2631, 2759, 2890, 3231, 3259, 3333, 3487, 3491, 3586, 3587, or 3756. In some embodiments, the sense strand sequence comprises or consists of the sequence of any one of SEQ ID NOs: 888, 1683, 1684, 1912, 1922, 1927, 1938, 2014, 2167, 2213, 2362, 2364, 2365, 2598, 2631, 2759, 2890, 3231, 3259, 3333, 3487, 3491, 3586, 3587, or 3756, or a sense strand sequence thereof having 1, 2, 3, or 4 nucleoside substitutions, additions, or deletions. In some embodiments, the sense strand sequence comprises or consists of the sequence of any one of SEQ ID NOs: 888, 1683, 1684, 1912, 1922, 1927, 1938, 2014, 2167, 2213, 2362, 2364, 2365, 2598, 2631, 2759, 2890, 3231, 3259, 3333, 3487, 3491, 3586, 3587, or 3756, or a sense strand sequence thereof having 1 or 2 nucleoside substitutions, additions, or deletions. In some embodiments, the sense strand sequence comprises or consists of a sequence 100% identical to SEQ ID NOs: 888, 1683, 1684, 1912, 1922, 1927, 1938, 2014, 2167, 2213, 2362, 2364, 2365, 2598, 2631, 2759, 2890, 3231, 3259, 3333, 3487, 3491, 3586, 3587, or 3756. The sense strand may comprise a modification pattern described herein. The sense strand may comprise a lipid moiety. The sense strand may comprise a GalNAc moiety.

[0065] In some embodiments, the siRNA comprises an antisense strand having a sequence in accordance with any of SEQ ID NOs: 6378, 7173, 7174, 7402, 7412, 7417, 7428, 7504, 7657, 7703, 7852, 7854, 7855, 8088, 8121, 8249, 8380, 8721, 8749, 8823, 8977, 8981, 9076, 9077, or 9246. In some embodiments, the antisense strand sequence comprises or consists of sequence at least 75% identical to any one of SEQ ID NOs: 6378, 7173, 7174, 7402, 7412, 7417, 7428, 7504, 7657, 7703, 7852, 7854, 7855, 8088, 8121, 8249, 8380, 8721, 8749, 8823, 8977, 8981, 9076, 9077, or 9246, at least 80% identical to any one of SEQ ID NOs: 6378, 7173, 7174, 7402, 7412, 7417, 7428, 7504, 7657, 7703, 7852, 7854, 7855, 8088, 8121, 8249, 8380, 8721, 8749, 8823, 8977, 8981, 9076, 9077, or 9246, at least 85% identical to of any one of SEQ ID NOs: 6378, 7173, 7174, 7402, 7412, 7417, 7428, 7504, 7657, 7703, 7852, 7854, 7855, 8088, 8121, 8249, 8380, 8721, 8749, 8823, 8977, 8981, 9076, 9077, or 9246, at least 90% identical to any one of SEQ ID NOs: 6378, 7173, 7174, 7402, 7412, 7417, 7428, 7504, 7657, 7703, 7852, 7854, 7855, 8088, 8121, 8249, 8380, 8721, 8749, 8823, 8977, 8981, 9076, 9077, or 9246, or at least 95% identical to any one of SEQ ID NOs: 6378, 7173, 7174, 7402, 7412, 7417, 7428, 7504, 7657, 7703, 7852, 7854, 7855, 8088, 8121, 8249, 8380, 8721, 8749, 8823, 8977, 8981, 9076, 9077, or 9246. In some embodiments, the antisense strand sequence comprises or consists of the sequence of any one of SEQ ID NOs: 6378, 7173, 7174, 7402, 7412, 7417, 7428, 7504, 7657, 7703, 7852, 7854, 7855, 8088, 8121, 8249, 8380, 8721, 8749, 8823, 8977, 8981, 9076, 9077, or 9246, or an antisense strand sequence thereof having 1, 2, 3, or 4 nucleoside substitutions, additions, or deletions. In some embodiments, the antisense strand sequence comprises or consists of the sequence of any one of SEQ ID NOs: 6378, 7173, 7174, 7402, 7412, 7417, 7428, 7504, 7657, 7703, 7852, 7854, 7855, 8088, 8121, 8249, 8380, 8721, 8749, 8823, 8977, 8981, 9076, 9077, or 9246, or an antisense strand sequence thereof having 1 or 2 nucleoside substitutions, additions, or deletions. In some embodiments, the antisense strand sequence comprises or consists of a sequence 100% identical to SEQ ID NOs: 6378, 7173, 7174, 7402, 7412, 7417, 7428, 7504, 7657, 7703, 7852, 7854, 7855, 8088, 8121, 8249, 8380, 8721, 8749, 8823, 8977, 8981, 9076, 9077, or 9246. The antisense strand may comprise a modification pattern described herein. The antisense strand may comprise a lipid moiety. The antisense strand may comprise a GalNAc moiety.

### B. ASOs

[0066] In some embodiments, the composition comprises an oligonucleotide that inhibits the expression of SOS2, wherein the oligonucleotide comprises an antisense oligonucleotide (ASO). In some embodiments, the ASO is 12-30 nucleosides in length. In some embodiments, the ASO is 14-30 nucleosides in length. In some embodiments, the ASO is at least about 10, 11, 12, 13, 14, 15, 16, 17, 18, 19, 20, 21, 22, 23, 24, 25, 26, 27, 28, 29, or 30 nucleosides in length, or a range defined by any of the two aforementioned numbers. In some embodiments, the ASO is 15-25 nucleosides in length. In some embodiments, the ASO is 20 nucleosides in length.

[0067] In some embodiments, the composition comprises an oligonucleotide that inhibits the expression of SOS2, wherein the oligonucleotide comprises an ASO about 12-30 nucleosides in length and comprising a nucleoside sequence complementary to about 12-30 contiguous nucleosides of a full-length human SOS2 mRNA sequence such as SEQ ID NO: 11253; wherein (i) the oligonucleotide comprises a modification comprising a modified nucleoside and/or a modified internucleoside linkage, and/or (ii) the composition comprises a pharmaceutically acceptable carrier. In some embodiments, the ASO comprise a nucleoside sequence complementary to at least about 10, 11, 12, 13, 14, 15, 16, 17, 18, 19, 20, 21, 22, 23, 24, 25, 26, 27, 28, 29, 30, or more contiguous nucleosides of one of SEQ ID NO: 11253.

### C. Modifications

[0068] In some embodiments, the composition comprises an oligonucleotide that inhibits the expression of SOS2, wherein the oligonucleotide comprises a modification comprising a modified nucleoside and/or a modified internucleoside linkage, and/or (ii) the composition comprises a pharmaceutically acceptable carrier. In some embodiments, the oligonucleotide comprises a modification comprising a modified nucleoside and/or a modified internucleoside linkage. In some embodiments, the oligonucleotide comprises a modified internucleoside linkage. In some embodiments, the modified internucleoside linkage comprises alkylphosphonate, phosphorothioate, methylphosphonate, phosphorodithioate, alkylphosphonothioate, phosphoramidate, carbamate, carbonate, phosphate triester, acetamidate, or carboxymethyl ester, or a combination thereof. In some embodiments, the modified internucleoside linkage comprises one or more phosphorothioate linkages. Benefits of the modified internucleoside linkage may include decreased toxicity or improved pharmacokinetics.

[0069] In some embodiments, the composition comprises an oligonucleotide that inhibits the expression of SOS2, wherein the oligonucleotide comprises a modified internucleoside linkage, wherein the oligonucleotide comprises 1, 2, 3, 4, 5, 6, 7, 8, 9, 10, 11, 12, 13, 14, 15, 16, 17, 18, 19, or 20 modified internucleoside linkages, or a range of modified internucleoside linkages defined by any two of the aforementioned numbers. In some embodiments, the oligonucleotide comprises no more than 18 modified internucleoside linkages. In some embodiments, the oligonucleotide comprises no more than 20 modified internucleoside linkages. In some embodiments, the oligonucleotide comprises 2 or more modified internucleoside linkages, 3 or more modified internucleoside linkages, 4 or more modified internucleoside linkages, 5 or more modified internucleoside linkages, 6 or more modified internucleoside linkages, 7 or more modified internucleoside linkages, 8 or more modified internucleoside linkages, 9 or more modified internucleoside linkages, 10 or more modified internucleoside linkages, 11 or more modified internucleoside linkages, 12 or more modified internucleoside linkages, 13 or more modified internucleoside linkages, 14 or more modified internucleoside linkages, 15 or more modified internucleoside linkages, 16 or more modified internucleoside linkages, 17 or more modified internucleoside linkages, 18 or more modified internucleoside linkages, 19 or more modified internucleoside linkages, or 20 or more modified internucleoside linkages.

[0070] In some embodiments, the composition comprises an oligonucleotide that inhibits the expression of SOS2, wherein the oligonucleotide comprises the modified nucleoside. In some embodiments, the modified nucleoside comprises a locked nucleic acid (LNA), hexitol nucleic acid (HLA), cyclohexene nucleic acid (CeNA), 2′-methoxyethyl, 2′-O-alkyl, 2′-O-allyl, 2′-fluoro, or 2′-deoxy, or a combination thereof. In some embodiments, the modified nucleoside comprises a LNA. In some embodiments, the modified nucleoside comprises a 2′,4′ constrained ethyl nucleic acid. In some embodiments, the modified nucleoside comprises HLA. In some embodiments, the modified nucleoside comprises CeNA. In some embodiments, the modified nucleoside comprises a 2′-methoxyethyl group. In some embodiments, the modified nucleoside comprises a 2′-O-alkyl group. In some embodiments, the modified nucleoside comprises a 2′-O-allyl group. In some embodiments, the modified nucleoside comprises a 2′-fluoro group. In some embodiments, the modified nucleoside comprises a 2′-deoxy group. In some embodiments, the modified nucleoside comprises a 2′-O-methyl nucleoside, 2′-deoxyfluoro nucleoside, 2′-O—N-methylacetamido (2′-O-NMA) nucleoside, a 2′-O-dimethylaminoethoxyethyl (2′-O-DMAEOE) nucleoside, 2′-O-aminopropyl (2′-O-AP) nucleoside, or 2′-ara-F, or a combination thereof. In some embodiments, the modified nucleoside comprises a 2′-O-methyl nucleoside. In some embodiments, the modified nucleoside comprises a 2′-deoxyfluoro nucleoside. In some embodiments, the modified nucleoside comprises a 2′-O-NMA nucleoside. In some embodiments, the modified nucleoside comprises a 2′-O-DMAEOE nucleoside. In some embodiments, the modified nucleoside comprises a 2′-O-aminopropyl (2′-O-AP) nucleoside. In some embodiments, the modified nucleoside comprises 2′-ara-F. In some embodiments, the modified nucleoside comprises one or more 2′fluoro modified nucleosides. In some embodiments, the modified nucleoside comprises a 2′ O-alkyl modified nucleoside. Benefits of the modified nucleoside may include decreased toxicity or improved pharmacokinetics.

[0071] In some embodiments, the oligonucleotide comprises 1, 2, 3, 4, 5, 6, 7, 8, 9, 10, 11, 12, 13, 14, 15, 16, 17, 18, 19, 20, or 21 modified nucleosides, or a range of nucleosides defined by any two of the aforementioned numbers. In some embodiments, the oligonucleotide comprises no more than 19 modified nucleosides. In some embodiments, the oligonucleotide comprises no more than 21 modified nucleosides. In some embodiments, the oligonucleotide comprises 2 or more modified nucleosides, 3 or more modified nucleosides, 4 or more modified nucleosides, 5 or more modified nucleosides, 6 or more modified nucleosides, 7 or more modified nucleosides, 8 or more modified nucleosides, 9 or more modified nucleosides, 10 or more modified nucleosides, 11 or more modified nucleosides, 12 or more modified nucleosides, 13 or more modified nucleosides, 14 or more modified nucleosides, 15 or more modified nucleosides, 16 or more modified nucleosides, 17 or more modified nucleosides, 18 or more modified nucleosides, 19 or more modified nucleosides, 20 or more modified nucleosides, or 21 or more modified nucleosides.

[0072] In some embodiments, the composition comprises an oligonucleotide that inhibits the expression of SOS2, wherein the oligonucleotide comprises an arginine-glycine-aspartic acid (RGD) peptide. In some embodiments, the composition comprises an RGD peptide. In some embodiments, the composition comprises an RGD peptide derivative. In some embodiments, the RGD peptide is attached at a 3′ terminus of the oligonucleotide. In some embodiments, the RGD peptide is attached at a 5′ terminus of the oligonucleotide. In some embodiments, the composition comprises a sense strand, and the RGD peptide is attached to the sense strand (e.g. attached to a 5′ end of the sense strand, or attached to a 3′ end of the sense strand). In some embodiments, the composition comprises an antisense strand, and the RGD peptide is attached to the antisense strand (e.g. attached to a 5′ end of the antisense strand, or attached to a 3′ end of the antisense strand). In some embodiments, the composition comprises an RGD peptide attached at a 3′ or 5′ terminus of the oligonucleotide. In some embodiments, the oligonucleotide comprises an RGD peptide and a lipid attached at a 3′ or 5′ terminus of the oligonucleotide. In some embodiments, the RGD peptide comprises Cyclo(-Arg-Gly-Asp-D-Phe-Cys). In some embodiments, the RGD peptide comprises Cyclo(-Arg-Gly-Asp-D-Phe-Lys). In some embodiments, the RGD peptide comprises Cyclo(-Arg-Gly-Asp-D-Phe-azido). In some embodiments, the RGD peptide comprises an amino benzoic acid derived RGD. In some embodiments, the RGD peptide comprises Cyclo(-Arg-Gly-Asp-D-Phe-Cys), Cyclo(-Arg-Gly-Asp-D-Phe-Lys), Cyclo(-Arg-Gly-Asp-D-Phe-azido), an amino benzoic acid derived RGD, or a combination thereof. In some embodiments, the RGD peptide comprises multiple of such RGD peptides. For example, the RGD peptide may include 2, 3, or 4 RGD peptides.

[0073] In some embodiments, the moiety includes a negatively charged group attached at a 5′ end of the oligonucleotide. This may be referred to as a 5′-end group. In some embodiments, the negatively charged group is attached at a 5′ end of an antisense strand of an siRNA disclosed herein. The 5′-end group may be or include a 5′-end phosphorothioate, 5′-end phosphorodithioate, 5′-end vinylphosphonate (5′-VP), 5′-end methylphosphonate, 5′-end cyclopropyl phosphonate, or a 5′-deoxy-5′-C-malonyl. The 5′-end group may comprise 5′-VP. In some embodiments, the 5′-VP comprises a trans-vinylphosphate or cis-vinylphosphate. The 5′-end group may include an extra 5′ phosphate. A combination of 5′-end groups may be used.

[0074] In some embodiments, the oligonucleotide includes a negatively charged group. The negatively charged group may aid in cell or tissue penetration. The negatively charged group may be attached at a 5′ or 3′ end (e.g. a 5′ end) of the oligonucleotide. This may be referred to as an end group. The end group may be or include a phosphorothioate, phosphorodithioate, vinylphosphonate, methylphosphonate, cyclopropyl phosphonate, or a deoxy-C-malonyl. The end group may include an extra 5′ phosphate such as an extra 5′ phosphate. A combination of end groups may be used.

[0075] In some embodiments, the oligonucleotide includes a phosphate mimic. In some embodiments, the phosphate mimic comprises vinyl phosphonate. In some embodiments, the vinyl phosphonate comprises a trans-vinylphosphate. In some embodiments, the vinyl phosphonate comprises a cis-vinylphosphate. An example of a nucleotide that includes a vinyl phosphonate is shown below.

[chemical structure]

5′ vinylphosphonate 2′ O Methyl Uridine

[0076] In some embodiments, the vinyl phosphonate increases the stability of the oligonucleotide. In some embodiments, the vinyl phosphonate increases the accumulation of the oligonucleotide in tissues. In some embodiments, the vinyl phosphonate protects the oligonucleotide from an exonuclease or a phosphatase. In some embodiments, the vinyl phosphonate improves the binding affinity of the oligonucleotide with the siRNA processing machinery.

[0077] In some embodiments, the oligonucleotide includes 1 vinyl phosphonate. In some embodiments, the oligonucleotide includes 2 vinyl phosphonates. In some embodiments, the oligonucleotide includes 3 vinyl phosphonates. In some embodiments, the oligonucleotide includes 4 vinyl phosphonates. In some embodiments, the antisense strand of the oligonucleotide comprises a vinyl phosphonate at the 5′ end. In some embodiments, the antisense strand of the oligonucleotide comprises a vinyl phosphonate at the 3′ end. In some embodiments, the sense strand of the oligonucleotide comprises a vinyl phosphonate at the 5′ end. In some embodiments, the sense strand of the oligonucleotide comprises a vinyl phosphonate at the 3′ end.

### D. Hydrophobic Moieties

[0078] In some embodiments, the composition comprises an oligonucleotide that inhibits the expression of SOS2, wherein the oligonucleotide comprises a lipid attached at a 3′ or 5′ terminus of the oligonucleotide. In some embodiments, the lipid comprises cholesterol, myristoyl, palmitoyl, stearoyl, lithocholoyl, docosanoyl, docosahexaenoyl, myristyl, palmityl stearyl, or α-tocopherol, or a combination thereof.

[0079] In some embodiments, the composition comprises an oligonucleotide that inhibits the expression of SOS2, wherein the oligonucleotide comprises a hydrophobic ligand or moiety. In some embodiments, the hydrophobic ligand or moiety comprises cholesterol. In some embodiments, the hydrophobic ligand or moiety comprises a cholesterol derivative. In some embodiments, the hydrophobic ligand or moiety is attached at a 3′ terminus of the oligonucleotide. In some embodiments, the hydrophobic ligand or moiety s attached at a 5′ terminus of the oligonucleotide. In some embodiments, the composition comprises a sense strand, and the hydrophobic ligand or moiety is attached to the sense strand (e.g. attached to a 5′ end of the sense strand, or attached to a 3′ end of the sense strand). In some embodiments, the composition comprises an antisense strand, and the hydrophobic ligand or moiety is attached to the antisense strand (e.g. attached to a 5′ end of the antisense strand, or attached to a 3′ end of the antisense strand). In some embodiments, the composition comprises a hydrophobic ligand or moiety attached at a 3′ or 5′ terminus of the oligonucleotide.

[0080] In some embodiments, a hydrophobic moiety is attached to the oligonucleotide (e.g. a sense strand and/or an antisense strand of a siRNA). In some embodiments, a hydrophobic moiety is attached at a 3′ terminus of the oligonucleotide. In some embodiments, a hydrophobic moiety is attached at a 5′ terminus of the oligonucleotide. In some embodiments, the hydrophobic moiety comprises cholesterol. In some embodiments, the hydrophobic moiety includes a cyclohexanyl.

[0081] In some embodiments, the composition comprises an oligonucleotide that inhibits the expression of SOS, wherein the oligonucleotide comprises a lipid attached at a 3′ or 5′ terminus of the oligonucleotide. In some embodiments, a lipid is attached at a 3′ terminus of the oligonucleotide. In some embodiments, a lipid is attached at a 5′ terminus of the oligonucleotide. In some embodiments, the lipid comprises cholesterol, myristoyl, palmitoyl, stearoyl, lithocholoyl, docosanoyl, docosahexaenoyl, myristyl, palmityl stearyl, or α-tocopherol, or a combination thereof. In some embodiments, the lipid comprises stearyl, lithocholyl, docosanyl, docosahexaenyl, or myristyl. In some embodiments, the lipid comprises cholesterol. In some embodiments, the lipid includes a sterol such as cholesterol. In some embodiments, the lipid comprises stearyl, t-butylphenol, n-butylphenol, octylphenol, dodecylphenol, phenyl n-dodecyl, octadecylbenzamide, hexadecylbenzamide, or octadecylcyclohexyl. In some embodiments, the lipid comprises phenyl para C12.

[0082] In some embodiments, the oligonucleotide comprises any aspect of the following structure:

[chemical structure]

In some embodiments, the oligonucleotide comprises any aspect of the following structure:

[chemical structure]

In some embodiments, the oligonucleotide comprises any aspect of the following structure:

[chemical structure]

In some embodiments, the oligonucleotide comprises any aspect of the following structure: The aspect included in the oligonucleotide may include the entire structure, or may include the lipid moiety, of any of the structures shown. In some embodiments, n is 1-3. In some embodiments, n is 1. In some embodiments, n is 2. In some embodiments, n is 3. In some embodiments, R is an alkyl group. In some embodiments, the alkyl group contains 1, 2, 3, 4, 5, 6, 7, 8, 9, 10, 11, 12, 13, 14, 15, 16, 17, 18, 19, or 20 carbons. In some embodiments, the alkyl group contains 4, 5, 6, 7, 8, 9, 10, 11, 12, 13, 14, 15, 16, 17, or 18 carbons, or a range defined by any two of the aforementioned numbers of carbons. In some embodiments, the alkyl group contains 4-18 carbons. In some embodiments, the lipid moiety comprises an alcohol or ether.

[0083] In some embodiments, the lipid includes a fatty acid. In some embodiments, the lipid comprises a lipid depicted in Table 1. The example lipid moieties in Table 1 are shown attached at a 5′ end of an oligonucleotide, in which the 5′ terminal phosphate of the oligonucleotide is shown with the lipid moiety. In some embodiments, a lipid moiety in Table 1 may be attached at a different point of attachment than shown. For example, the point of attachment of any of the lipid moieties in the table may be at a 3′ oligonucleotide end. In some embodiments, the lipid is used for targeting the oligonucleotide to a non-hepatic cell or tissue.

TABLE 1
Hydrophobic moiety examples

| Hydrophobic | Hydrophobic | |
|---|---|---|
| Moiety Description | Moiety Name | Example Conjugation |
| stearyl | ETL3 | [chemical structure] |
| t-butylphenyl | ETL7 | [chemical structure] |
| n-butylphenyl | ETL8 | [chemical structure] |
| octylphenyl | ETL9 | [chemical structure] |
| dodecylphenyl | ETL10 | [chemical structure] |
| phenyl n-dodecyl | ETL12 | [chemical structure] |
| octadecylbenzamide | ETL13 | [chemical structure] |
| hexadecylbenzamide | ETL15 | [chemical structure] |
| octadecylcyclohexyl | ETL16 | [chemical structure] |

[0084] In some embodiments, the lipid or lipid moiety includes 16 to 18 carbons. In some embodiments, the lipid includes 16 carbons. In some embodiments, the lipid includes 17 carbons. In some embodiments, the lipid includes 18 carbons. In some embodiments, the lipid moiety includes 16 carbons. In some embodiments, the lipid moiety includes 17 carbons. In some embodiments, the lipid moiety includes 18 carbons.

[0085] The hydrophobic moiety may include a linker that comprises a carbocycle. The carbocycle may be six-membered. Some examples of a carbocycle include phenyl or cyclohexyl. The linker may include a phenyl. The linker may include a cyclohexyl. The lipid may be attached to the carbocycle, which may in turn be attached at a phosphate (e.g. 5′ or 3′ phosphate) of the oligonucleotide. In some embodiments, the lipid or hydrocarbon, and the end of the sense are connected to the phenyl or cyclohexyl linker in the 1,4; 1,3; or 1,2 substitution pattern (e.g. the para, meta, or ortho phenyl configuration). In some embodiments, the lipid or hydrocarbon, and the end of the sense are connected to the phenyl or cyclohexyl linker in the 1,4 substitution pattern (e.g. the para phenyl configuration). The lipid may be attached to the carbocycle in the 1,4 substitution pattern relative to the oligonucleotide. The lipid may be attached to the carbocycle in the 1,3 substitution pattern relative to the oligonucleotide. The lipid may be attached to the carbocycle in the 1,2 substitution pattern relative to the oligonucleotide. The lipid may be attached to the carbocycle in the ortho orientation relative to the oligonucleotide. The lipid may be attached to the carbocycle in the para orientation relative to the oligonucleotide. The lipid may be attached to the carbocycle in the meta orientation relative to the oligonucleotide.

[0086] The lipid moiety may comprise or consist of the following structure

[chemical structure]

In some embodiments, the lipid moiety comprises or consists of the following structure:

[chemical structure]

In some embodiments, the lipid moiety comprises the following structure:

[chemical structure]

In some embodiments, the lipid moiety comprises or consist of the following structure:

[chemical structure]

In some embodiments, the dotted line indicates a covalent connection. The covalent connection may between an end of the sense or antisense strand. For example, the connection may be to the 5′ end of the sense strand. In some embodiments, n is 0-3. In some embodiments, n is 1-3. In some embodiments, n is 0. In some embodiments, n is 1. In some embodiments, n is 2. In some embodiments, n is 3. In some embodiments, n is 4. In some embodiments, n is 5. In some embodiments, n is 1, 2, 3, 4, 5, 6, 7, 8, 9, or 10. In some embodiments, R is an alkyl group. In some embodiments, the alkyl group contains 1, 2, 3, 4, 5, 6, 7, 8, 9, 10, 11, 12, 13, 14, 15, 16, 17, 18, 19, or 20 carbons. In some embodiments, the alkyl group contains 4, 5, 6, 7, 8, 9, 10, 11, 12, 13, 14, 15, 16, 17, or 18 carbons, or a range defined by any two of the aforementioned numbers of carbons. In some embodiments, R comprises or consists of an alkyl group containing 4-18 carbons.

[0087] The lipid moiety may be attached at a 5′ end of the oligonucleotide. The 5′ end may have one phosphate linking the lipid moiety to a 5′ carbon of a sugar of the oligonucleotide. The 5′ end may have two phosphates linking the lipid moiety to a 5′ carbon of a sugar of the oligonucleotide. The 5′ end may have three phosphates linking the lipid moiety to a 5′ carbon of a sugar of the oligonucleotide. The 5′ end may have one phosphate connected to the 5′ carbon of a sugar of the oligonucleotide, where the one phosphate is connected to the lipid moiety. The 5′ end may have two phosphates connected to the 5′ carbon of a sugar of the oligonucleotide, where the one of the two phosphates is connected to the lipid moiety. The 5′ end may have three phosphates connected to the 5′ carbon of a sugar of the oligonucleotide, where the one of the three phosphates is connected to the lipid moiety. The sugar may include a ribose. The sugar may include a deoxyribose. The sugar may be modified a such as a 2′ modified sugar (e.g. a 2′ O-methyl or 2′ fluoro ribose). A phosphate of the 5′ end may include a modification such as a sulfur in place of an oxygen. Two phosphates of the 5′ end may include a modification such as a sulfur in place of an oxygen. Three phosphates of the 5′ end may include a modification such as a sulfur in place of an oxygen.

[0088] In some embodiments, the oligonucleotide includes 1 lipid moiety. In some embodiments, the oligonucleotide includes 2 lipid moieties. In some embodiments, the oligonucleotide includes 3 lipid moieties. In some embodiments, the oligonucleotide includes 4 lipid moieties.

[0089] Some embodiments relate to a method of making an oligonucleotide comprising a hydrophobic conjugate. A strategy for making hydrophobic conjugates may include use of a phosphoramidite reagent based upon a 6-membered ring alcohol such as a phenol or cyclohexanol. The phosphoramidite may be reacted to a nucleotide to connect the nucleotide to the hydrophobic moiety, and thereby produce the hydrophobic conjugate. Some examples of phosphoramidite reagents that may be used to produce a hydrophobic conjugate are provided as follows:

[chemical structure]

[0090] In some embodiments, n is 1-3. In some embodiments, n is 1. In some embodiments, n is 2. In some embodiments, n is 3. In some embodiments, R is an alkyl group. In some embodiments, the alkyl group contains 1, 2, 3, 4, 5, 6, 7, 8, 9, 10, 11, 12, 13, 14, 15, 16, 17, 18, 19, or 20 carbons. In some embodiments, the alkyl group contains 4, 5, 6, 7, 8, 9, 10, 11, 12, 13, 14, 15, 16, 17, or 18 carbons, or a range defined by any two of the aforementioned numbers of carbons. In some embodiments, R comprises or consists of an alkyl group containing 4-18 carbons. Any one of the phosphoramidite reagents may be reacted to a 5′ end of an oligonucleotide to produce an oligonucleotide comprising a hydrophobic moiety. In some embodiments, the phosphoramidite reagents is reacted to a 5′ end of a sense strand of an siRNA. The sense strand may then be hybridized to an antisense strand to form a duplex. The hybridization may be performed by incubating the sense and antisense strands in solution at a given temperature. The temperature may be gradually reduced. The temperature may comprise or include a temperature comprising an annealing temperature for the sense and antisense strands. The temperature may be below or include a temperature below the annealing temperature for the sense and antisense strands. The temperature may be below a melting temperature of the sense and antisense strands.

[0091] The lipid may be attached to the oligonucleotide by a linker. The linker may include a polyethyleneglycol (e.g. tetraethyleneglycol).

### E. Sugar Moieties

[0092] In some embodiments, the composition comprises an oligonucleotide that inhibits the expression of SOS2, wherein the oligonucleotide comprises a sugar moiety. The sugar moiety may include an N-acetyl galactose moiety (e.g. an N-acetylgalactosamine (GalNAc) moiety), an N-acetyl glucose moiety (e.g. an N-acetylglucosamine (GlcNAc) moiety), a fucose moiety, or a mannose moiety. The sugar moiety may include 1, 2, 3, or more sugar molecules. The sugar moiety may be attached at a 3′ or 5′ terminus of the oligonucleotide. The sugar moiety may include an N-acetyl galactose moiety. The sugar moiety may include an N-acetylgalactosamine (GalNAc) moiety. The sugar moiety may include an N-acetyl glucose moiety. The sugar moiety may include N-acetylglucosamine (GlcNAc) moiety. The sugar moiety may include a fucose moiety. The sugar moiety may include a mannose moiety. N-acetyl glucose, GlcNAc, fucose, or mannose may be useful for targeting macrophages when they target or bind a mannose receptor such as CD206. The sugar moiety may be useful for binding or targeting an asialoglycoprotein receptor such as an asialoglycoprotein receptor of a hepatocyte. The GalNAc moiety may bind to an asialoglycoprotein receptor. The GalNAc moiety may target a hepatocyte.

[0093] In some embodiments, the composition comprises an oligonucleotide that inhibits the expression of SOS2, wherein the oligonucleotide comprises an N-acetylgalactosamine (GalNAc) moiety. GalNAc may be useful for hepatocyte targeting. The GalNAc moiety may include a bivalent or trivalent branched linker. The oligo may be attached to 1, 2 or 3 GalNAcs through a bivalent or trivalent branched linker. The GalNAc moiety may include 1, 2, 3, or more GalNAc molecules. The GalNAc moiety may be attached at a 3′ or 5′ terminus of the oligonucleotide.

[0094] In some embodiments, the composition comprises an oligonucleotide that inhibits the expression of SOS2, wherein the oligonucleotide comprises an N-acetylgalactosamine (GalNAc) ligand for hepatocyte targeting. In some embodiments, the composition comprises GalNAc. In some embodiments, the composition comprises a GalNAc derivative. In some embodiments, the GalNAc ligand is attached at a 3′ terminus of the oligonucleotide. In some embodiments, the GalNAc ligand is attached at a 5′ terminus of the oligonucleotide. In some embodiments, the composition comprises a sense strand, and the GalNAc ligand is attached to the sense strand (e.g. attached to a 5′ end of the sense strand, or attached to a 3′ end of the sense strand). In some embodiments, the composition comprises an antisense strand, and the GalNAc ligand is attached to the antisense strand (e.g. attached to a 5′ end of the antisense strand, or attached to a 3′ end of the antisense strand). In some embodiments, the composition comprises a GalNAc ligand attached at a 3′ or 5′ terminus of the oligonucleotide.

[0095] In some embodiments, described herein is a compound (e.g. oligonucleotide) represented by Formula (I) or (II):

[chemical structure]

[0096] or a salt thereof, wherein
[0097] J is an oligonucleotide;
[0098] each w is independently selected from any value from 1 to 20;
[0099] each v is independently selected from any value from 1 to 20;
[0100] n is selected from any value from 1 to 20;
[0101] m is selected from any value from 1 to 20;
[0102] z is selected from any value from 1 to 3, wherein
   [0103] if z is 3, Y is C
   [0104] if z is 2, Y is CR⁶, or
   [0105] if z is 1, Y is C(R⁶)₂;
[0106] Q is selected from:
   [0107] C₃₋₁₀ carbocycle optionally substituted with one or more substituents independently selected from halogen, —CN, —NO₂, —OR⁷, —SR⁷, —N(R⁷)₂, —C(O)R⁷, —C(O)N(R⁷)₂, —N(R⁷)C(O)R⁷, —N(R⁷)C(O)N(R⁷)₂, —OC(O)N(R⁷)₂, —N(R⁷)C(O)OR⁷, —C(O)OR⁷, —OC(O)R⁷, —S(O)R⁷, and C₁₋₆ alkyl, wherein the C₁₋₆ alkyl, is optionally substituted with one or more substituents independently selected from halogen, —CN, —OH, —SH, —NO₂, and —NH₂;
[0108] R¹ is a linker selected from:
   [0109] —O—, —S—, —N(R⁷)—, —C(O)—, —C(O)N(R⁷)—, —N(R⁷)C(O)—, —N(R⁷)C(O)N(R⁷)—, —OC(O)N(R⁷)—, —N(R⁷)C(O)O—, —C(O)O—, —OC(O)—, —S(O)—, —S(O)₂—, —OS(O)₂—, —OP(O)(OR⁷)O—, —SP(O)(OR⁷)O—, —OP(S)(OR⁷)O—, —OP(O)(SR⁷)O—, —OP(O)(OR⁷)S—, —OP(O)(O⁻)O—, —SP(O)(O⁻)O—, —OP(S)(O⁻)O—, —OP(O)(S⁻)O—, —OP(O)(O⁻)S—, —OP(O)(OR⁷)NR⁷—, —OP(O)(N(R⁷)₂)NR⁷—, —OP(OR⁷)O—, —OP(N(R⁷)₂)O—, —OP(OR⁷)N(R⁷)—, and —OPN(R⁷)₂NR⁷—;
[0110] each R² is independently selected from:
   [0111] C₁₋₆ alkyl optionally substituted with one or more substituents independently selected from halogen, —OR⁷, —SR⁷, —N(R⁷)₂, —C(O)R⁷, —C(O)N(R⁷)₂, —N(R⁷)C(O)R⁷, —N(R⁷)C(O)N(R⁷)₂, —OC(O)N(R⁷)₂, —N(R⁷)C(O)OR⁷, —C(O)OR⁷, —OC(O)R⁷, and —S(O)R⁷;
[0112] R³ and R⁴ are each independently selected from:
   [0113] —OR⁷, —SR⁷, —N(R⁷)₂, —C(O)R⁷, —C(O)N(R⁷)₂, —N(R⁷)C(O)R⁷, —N(R⁷)C(O)N(R⁷)₂, —OC(O)N(R⁷)₂, —N(R⁷)C(O)OR⁷, —C(O)OR⁷, —OC(O)R⁷, and —S(O)R⁷;
[0114] each R⁵ is independently selected from:
   [0115] —OC(O)R⁷, —OC(O)N(R⁷)₂, —N(R⁷)C(O)R⁷, —N(R⁷)C(O)N(R⁷)₂, —N(R⁷)C(O)OR⁷, —C(O)R⁷, —C(O)OR⁷, and —C(O)N(R⁷)₂;
[0116] each R⁶ is independently selected from:
   [0117] hydrogen;
   [0118] halogen, —CN, —NO₂, —OR⁷, —SR⁷, —N(R⁷)₂, —C(O)R⁷, —C(O)N(R⁷)₂, —N(R⁷)C(O)R⁷, —N(R⁷)C(O)N(R⁷)₂, —OC(O)N(R⁷)₂, —N(R⁷)C(O)OR⁷, —C(O)OR⁷, —OC(O)R⁷, and —S(O)R⁷; and
   [0119] C₁₋₆ alkyl optionally substituted with one or more substituents independently selected from halogen, —CN, —NO₂, —OR⁷, —SR⁷, —N(R⁷)₂, —C(O)R⁷, —C(O)N(R⁷)₂, —N(R⁷)C(O)R⁷, —N(R⁷)C(O)N(R⁷)₂, —OC(O)N(R⁷)₂, —N(R⁷)C(O)OR⁷, —C(O)OR⁷, —OC(O)R⁷, and —S(O)R⁷;
[0120] each R⁷ is independently selected from:
[0121] hydrogen;
   [0122] C₁₋₆ alkyl, C₂₋₆ alkenyl, and C₂₋₆ alkynyl, each of which is optionally substituted with one or more substituents independently selected from halogen, —CN, —OH, —SH, —NO₂, —NH₂, ═O, ═S, —O—C₁₋₆ alkyl, —S—C₁₋₆ alkyl, —N(C₁₋₆ alkyl)₂, —NH(C₁₋₆ alkyl), C₃₋₁₀ carbocycle, and 3- to 10-membered heterocycle; and
   [0123] C₃₋₁₀ carbocycle, and 3- to 10-membered heterocycle, each of which is optionally substituted with one or more substituents independently selected from halogen, —CN, —OH, —SH, —NO₂, —NH₂, ═O, ═S, —O—C₁₋₆ alkyl, —S—C₁₋₆ alkyl, —N(C₁₋₆ alkyl)₂, —NH(C₁₋₆ alkyl), C₁₋₆ alkyl, C₂₋₆ alkenyl, C₂₋₆ alkynyl, C₃₋₁₀ carbocycle, 3- to 10-membered heterocycle, and C₁₋₆ haloalkyl.
      In some embodiments, each w is independently selected from any value from 1 to 10. In some embodiments, each w is independently selected from any value from 1 to 5. In some embodiments, each w is 1. In some embodiments, each v is independently selected from any value from 1 to 10. In some embodiments, each v is independently selected from any value from 1 to 5. In some embodiments, each v is 1. In some embodiments, n is selected from any value from 1 to 10. In some embodiments, n is selected from any value from 1 to 5. In some embodiments, n is 2. In some embodiments, m is selected from any value from 1 to 10. In some embodiments, m is selected from any value from 1 to 5. In some embodiments, m is selected from 1 and 2. In some embodiments, z is 3 and Y is C. In some embodiments, Q is selected from C₅₋₆ carbocycle optionally substituted with one or more substituents independently selected from halogen, —CN, —NO₂, —OR⁷, —SR⁷, —N(R⁷)₂, —C(O)R⁷, —C(O)N(R⁷)₂, —N(R⁷)C(O)R⁷, —N(R⁷)C(O)N(R⁷)₂, —OC(O)N(R⁷)₂, —N(R⁷)C(O)OR⁷, —C(O)OR⁷, —OC(O)R⁷, and —S(O)R⁷. In some embodiments, Q is selected from C₅₋₆ carbocycle optionally substituted with one or more substituents independently selected from halogen, —CN, —OH, —SH, —NO₂, and —NH₂. In some embodiments, Q is selected from phenyl and cyclohexyl, each of which is optionally substituted with one or more substituents independently selected from halogen, —CN, —OH, —SH, —NO₂, and —NH₂. In some embodiments, Q is selected from phenyl. In some embodiments, Q is selected from cyclohexyl. In some embodiments, R¹ is selected from —OP(O)(OR⁷)O—, —SP(O)(OR⁷)O—, —OP(S)(OR⁷)O—, —OP(O)(SR⁷)O—, —OP(O)(OR⁷)S—, —OP(O)(O⁻)O—, —SP(O)(O⁻)O—, —OP(S)(O⁻)O—, —OP(O)(S⁻)O—, —OP(O)(O⁻)S—, —OP(O)(OR⁷)NR⁷—, —OP(O)(N(R⁷)₂)NR⁷—, —OP(OR⁷)O—, —OP(N(R⁷)₂)O—, —OP(OR⁷)N(R⁷)—, and —OPN(R⁷)₂—NR⁷. In some embodiments, R¹ is selected from —OP(O)(OR⁷)O—, —SP(O)(OR⁷)O—, —OP(S)(OR⁷)O—, —OP(O)(SR⁷)O—, —OP(O)(OR⁷)S—, —OP(O)(O⁻)O—, —SP(O)(O⁻)O—, —OP(S)(O⁻)O—, —OP(O)(S⁻)O—, —OP(O)(O⁻)S—, and —OP(OR⁷)O—. In some embodiments, R¹ is selected from —OP(O)(OR⁷)O—, —OP(S)(OR⁷)O—, —OP(O)(O⁻)O—, —OP(S)(O⁻)O—, —OP(O)(S⁻)O—, and —OP(OR⁷)O—. In some embodiments, R¹ is selected from —OP(O)(OR⁷)O— and —OP(OR⁷)O—. In some embodiments, R² is selected from C₁₋₃ alkyl substituted with one or more substituents independently selected from halogen, —OR⁷, —OC(O)R⁷, —SR⁷, —N(R⁷)₂, —C(O)R⁷, and —S(O)R⁷. In some embodiments, R² is selected from C₁₋₃ alkyl substituted with one or more substituents independently selected from —OR⁷, —OC(O)R⁷, —SR⁷, and —N(R⁷)₂. In some embodiments, R² is selected from C₁₋₃ alkyl substituted with one or more substituents independently selected from —OR⁷ and —OC(O)R⁷. In some embodiments, R³ is selected from halogen, —OR⁷, —SR⁷, —N(R⁷)₂, —C(O)R⁷, —OC(O)R⁷, and —S(O)R⁷. In some embodiments, R³ is selected from —OR⁷, —SR⁷, —OC(O)R⁷, and —N(R⁷)₂. In some embodiments, R³ is selected from —OR⁷— and —OC(O)R⁷. In some embodiments, R⁴ is selected from halogen, —OR⁷, —SR⁷, —N(R⁷)₂, —C(O)R⁷, —OC(O)R⁷, and —S(O)R⁷. In some embodiments, R⁴ is selected from —OR⁷, —SR⁷, —OC(O)R⁷, and —N(R⁷)₂. In some embodiments, R⁴ is selected from —OR⁷— and —OC(O)R⁷. In some embodiments, R⁵ is selected from —OC(O)R⁷, —OC(O)N(R⁷)₂, —N(R⁷)C(O)R⁷, —N(R⁷)C(O)N(R⁷)₂, and —N(R⁷)C(O)OR⁷. In some embodiments, R⁵ is selected from —OC(O)R⁷ and —N(R⁷)C(O)R⁷. In some embodiments, each R⁷ is independently selected from: hydrogen; and C₁₋₆ alkyl optionally substituted with one or more substituents independently selected from halogen, —CN, —OH, —SH, —NO₂, —NH₂, ═O, ═S, —O—C₁₋₆ alkyl, —S—C₁₋₆ alkyl, —N(C₁₋₆ alkyl)₂, —NH(C₁₋₆ alkyl), C₃₋₁₀ carbocycle, or 3- to 10-membered heterocycle. In some embodiments, each R⁷ is independently selected from C₁₋₆ alkyl optionally substituted with one or more substituents independently selected from halogen, —CN, —OH, —SH, —NO₂, —NH₂, ═O, ═S, —O—C₁₋₆ alkyl, —S—C₁₋₆ alkyl, —N(C₁₋₆ alkyl)₂, and —NH(C₁₋₆ alkyl). In some embodiments, each R⁷ is independently selected from C₁₋₆ alkyl optionally substituted with one or more substituents independently selected from halogen, —CN, —OH, and —SH. In some embodiments, w is 1; v is 1; n is 2; m is 1 or 2; z is 3 and Y is C; Q is phenyl or cyclohexyl, each of which is optionally substituted with one or more substituents independently selected from halogen, —CN, —OH, —SH, —NO₂, —NH₂, and C₁₋₃ alkyl; R¹ is selected from —OP(O)(OR⁷)O—, —OP(S)(OR⁷)O—, —OP(O)(O⁻)O—, —OP(S)(O⁻)O—, —OP(O)(S⁻)O— and —OP(OR⁷)O—; R² is C₁ alkyl substituted with —OH or —OC(O)CH₃;
[0124] R³ is —OH or —OC(O)CH₃; R⁴ is —OH or —OC(O)CH₃; and R⁵ is —NH(O)CH₃. In some embodiments, the compound comprises:

[chemical structure]

[chemical structure]

[chemical structure]

[chemical structure]

[chemical structure]

[chemical structure]

[chemical structure]

[chemical structure]

[chemical structure]

[chemical structure]

[chemical structure]

[chemical structure]

[chemical structure]

[chemical structure]

[chemical structure]

[chemical structure]

In some embodiments, the oligonucleotide (J) is attached at a 5′ end or a 3′ end of the oligonucleotide. In some embodiments, the oligonucleotide comprises DNA. In some embodiments, the oligonucleotide comprises RNA. In some embodiments, the oligonucleotide comprises one or more modified internucleoside linkages. In some embodiments, the one or more modified internucleoside linkages comprise alkylphosphonate, phosphorothioate, methylphosphonate, phosphorodithioate, alkylphosphonothioate, phosphoramidate, carbamate, carbonate, phosphate triester, acetamidate, or carboxymethyl ester, or a combination thereof. In some embodiments, the oligonucleotide comprises 1, 2, 3, 4, 5, 6, 7, 8, 9, 10, 11, 12, 13, 14, 15, 16, 17, 18, 19, or 20 modified internucleoside linkages. In some embodiments, the compound binds to an asialoglycoprotein receptor. In some embodiments, the compound targets a hepatocyte.

### F. siRNA Modification Patterns

[0125] In some embodiments, the composition comprises an oligonucleotide that inhibits the expression of SOS2 wherein the oligonucleotide comprises an siRNA comprising a sense strand and an antisense strand, wherein the sense strand comprises modification pattern 1S: 5′-NfsnsNfnNfnNfNfNfnNfnNfnNfnNfnNfsnsn-3′, wherein “Nf” is a 2′ fluoro-modified nucleoside, “n” is a 2′ O-methyl modified nucleoside, and “s” is a phosphorothioate linkage. In some embodiments, the sense strand comprises modification pattern 2S: 5′-nsnsnnNfnNfNfNfnnnnnnnnnnsnsn-3′, wherein “Nf” is a 2′ fluoro-modified nucleoside, “n” is a 2′ O-methyl modified nucleoside, and “s” is a phosphorothioate linkage. In some embodiments, the sense strand comprises modification pattern 3S: 5′-nsnsnnNfnNfnNfnnnnnnnnnnsnsn-3′, wherein “Nf” is a 2′ fluoro-modified nucleoside, “n” is a 2′ O-methyl modified nucleoside, and “s” is a phosphorothioate linkage. In some embodiments, the sense strand comprises modification pattern 4S: 5′-NfsnsNfnNfnNfNfNfnNfnNfnNfnNfnNfsnsnN-3′, wherein “Nf” is a 2′ fluoro-modified nucleoside, “n” is a 2′ O-methyl modified nucleoside, and “s” is a phosphorothioate linkage. In some embodiments, the sense strand comprises modification pattern 5S: 5′-nsnsnnNfnNfNfNfnnnnnnnnnnsnsnN-3′, wherein “Nf” is a 2′ fluoro-modified nucleoside, “n” is a 2′ O-methyl modified nucleoside, and “s” is a phosphorothioate linkage. In some embodiments, the sense strand comprises modification pattern 6S: 5′-nnnnnnnNfNfnNfnnnnnnnnsnsn-3′, wherein “Nf” is a 2′ fluoro-modified nucleoside, “n” is a 2′ O-methyl modified nucleoside, and “s” is a phosphorothioate linkage. In some embodiments, the sense strand comprises modification pattern 7S: 5′-nnnnnnnNfNfNfNfnnnnnnnnsnsn-3′, wherein “Nf” is a 2′ fluoro-modified nucleoside, “n” is a 2′ O-methyl modified nucleoside, and “s” is a phosphorothioate linkage. In some embodiments, the sense strand comprises modification pattern 8S: 5′-nnnnnnNfnNfnNfhnnnnnnnsnsn-3′, wherein “Nf” is a 2′ fluoro-modified nucleoside, “n” is a 2′ O-methyl modified nucleoside, and “s” is a phosphorothioate linkage. In some embodiments, the sense strand comprises modification pattern 9S: 5′-nnnnnnNfnNfNfnnnnnnnnnsnsn-3′, wherein “Nf” is a 2′ fluoro-modified nucleoside, “n” is a 2′ O-methyl modified nucleoside, and “s” is a phosphorothioate linkage. In some embodiments, the sense strand comprises modification pattern 10S: 5′-nnnnnnNfNfNfNfnnnnnnnnnsnsn-3′, wherein “Nf” is a 2′ fluoro-modified nucleoside, “n” is a 2′ O-methyl modified nucleoside, and “s” is a phosphorothioate linkage. In some embodiments, the sense strand comprises modification pattern 11S: 5′-nnnnnnNfNfNfNfNfnnnnnnnnsnsn-3′, wherein “Nf” is a 2′ fluoro-modified nucleoside, “n” is a 2′ O-methyl modified nucleoside, and “s” is a phosphorothioate linkage. In some embodiments, the sense strand comprises modification pattern 12S: 5′-nnnnnNfnnNfnNfnnnnnnnnsnsn-3′, wherein “Nf” is a 2′ fluoro-modified nucleoside, “n” is a 2′ O-methyl modified nucleoside, and “s” is a phosphorothioate linkage. In some embodiments, the sense strand comprises modification pattern 13S: 5′-nnnnnNfnnNfNfnnnnnnnnnsnsn-3′, wherein “Nf” is a 2′ fluoro-modified nucleoside, “n” is a 2′ O-methyl modified nucleoside, and “s” is a phosphorothioate linkage. In some embodiments, the sense strand comprises modification pattern 14S: 5′-nnnnnNfnNfNfnnnnnnnnnnsnsn-3′, wherein “Nf” is a 2′ fluoro-modified nucleoside, “n” is a 2′ O-methyl modified nucleoside, and “s” is a phosphorothioate linkage. In some embodiments, the sense strand comprises modification pattern 15S: 5′-nnnnnNfnNfNfnNfhnnnnnnnsnsn-3′, wherein “Nf” is a 2′ fluoro-modified nucleoside, “n” is a 2′ O-methyl modified nucleoside, and “s” is a phosphorothioate linkage. In some embodiments, the sense strand comprises modification pattern 16S: 5′-nnnnnNfnNfNfNfNfnnnnnnnnsnsn-3′, wherein “Nf” is a 2′ fluoro-modified nucleoside, “n” is a 2′ O-methyl modified nucleoside, and “s” is a phosphorothioate linkage. In some embodiments, the sense strand comprises modification pattern 17S: 5′-nnnnnNfNfnNfnnnnnnnnnnsnsn-3′, wherein “Nf” is a 2′ fluoro-modified nucleoside, “n” is a 2′ O-methyl modified nucleoside, and “s” is a phosphorothioate linkage. In some embodiments, the sense strand comprises modification pattern 18S: 5′-nnnnnNfNfnNfnNfhnnnnnnnsnsn-3′, wherein “Nf” is a 2′ fluoro-modified nucleoside, “n” is a 2′ O-methyl modified nucleoside, and “s” is a phosphorothioate linkage. In some embodiments, the sense strand comprises modification pattern 19S: 5′-nnnnnNfNfnNfNfnnnnnnnnnsnsn-3′, wherein “Nf” is a 2′ fluoro-modified nucleoside, “n” is a 2′ O-methyl modified nucleoside, and “s” is a phosphorothioate linkage. In some embodiments, the sense strand comprises modification pattern 20S: 5′-nnnnnNfNfNfNfnnnnnnnnnnsnsn-3′, wherein “Nf” is a 2′ fluoro-modified nucleoside, “n” is a 2′ O-methyl modified nucleoside, and “s” is a phosphorothioate linkage. In some embodiments, the sense strand comprises modification pattern 21S: 5′-nnnnnNfNfNfNfnNfnnnnnnnnsnsn-3′, wherein “Nf” is a 2′ fluoro-modified nucleoside, “n” is a 2′ O-methyl modified nucleoside, and “s” is a phosphorothioate linkage. In some embodiments, the sense strand comprises modification pattern 22S: 5′-nnnnnNfNfNfNfNfnnnnnnnnnsnsn-3′, wherein “Nf” is a 2′ fluoro-modified nucleoside, “n” is a 2′ O-methyl modified nucleoside, and “s” is a phosphorothioate linkage. In some embodiments, the sense strand comprises modification pattern 23S: 5′-nnnnNfnnnNfhNfnnnnnnnnsnsn-3′, wherein “Nf” is a 2′ fluoro-modified nucleoside, “n” is a 2′ O-methyl modified nucleoside, and “s” is a phosphorothioate linkage. In some embodiments, the sense strand comprises modification pattern 24S: 5′-nnnnNfnnnNfNfnnnnnnnnnsnsn-3′, wherein “Nf” is a 2′ fluoro-modified nucleoside, “n” is a 2′ O-methyl modified nucleoside, and “s” is a phosphorothioate linkage. In some embodiments, the sense strand comprises modification pattern 25S: 5′-nnnnNfnnNfNfnnnnnnnnnnsnsn-3′, wherein “Nf” is a 2′ fluoro-modified nucleoside, “n” is a 2′ O-methyl modified nucleoside, and “s” is a phosphorothioate linkage. In some embodiments, the sense strand comprises modification pattern 26S: 5′-nnnnNfnnNfNfnNfhnnnnnnnsnsn-3′, wherein “Nf” is a 2′ fluoro-modified nucleoside, “n” is a 2′ O-methyl modified nucleoside, and “s” is a phosphorothioate linkage. In some embodiments, the sense strand comprises modification pattern 27S: 5′-nnnnNfnnNfNfNfNfnnnnnnnnsnsn-3′, wherein “Nf” is a 2′ fluoro-modified nucleoside, “n” is a 2′ O-methyl modified nucleoside, and “s” is a phosphorothioate linkage. In some embodiments, the sense strand comprises modification pattern 28S: 5′-nnnnNfnNfnNfnnnnnnnnnnsnsn-3′, wherein “Nf” is a 2′ fluoro-modified nucleoside, “n” is a 2′ O-methyl modified nucleoside, and “s” is a phosphorothioate linkage. In some embodiments, the sense strand comprises modification pattern 29S: 5′-nnnnNfnNfnNfnNfhnnnnnnnsnsn-3′, wherein “Nf” is a 2′ fluoro-modified nucleoside, “n” is a 2′ O-methyl modified nucleoside, and “s” is a phosphorothioate linkage. In some embodiments, the sense strand comprises modification pattern 30S: 5′-nnnnNfnNfnNfNfhnnnnnnnnsnsn-3′, wherein “Nf” is a 2′ fluoro-modified nucleoside, “n” is a 2′ O-methyl modified nucleoside, and “s” is a phosphorothioate linkage. In some embodiments, the sense strand comprises modification pattern 31S: 5′-nnnnNfnNfNfNfNfnnnnnnnnnsnsn-3′, wherein “Nf” is a 2′ fluoro-modified nucleoside, “n” is a 2′ O-methyl modified nucleoside, and “s” is a phosphorothioate linkage. In some embodiments, the sense strand comprises modification pattern 32S: 5′-nnnnNfNfnnNfnnnnnnnnnnsnsn-3′, wherein “Nf” is a 2′ fluoro-modified nucleoside, “n” is a 2′ O-methyl modified nucleoside, and “s” is a phosphorothioate linkage. In some embodiments, the sense strand comprises modification pattern 33S: 5′-nnnnNfNfnnNfnNfnnnnnnnnsnsn-3′, wherein “Nf” is a 2′ fluoro-modified nucleoside, “n” is a 2′ O-methyl modified nucleoside, and “s” is a phosphorothioate linkage. In some embodiments, the sense strand comprises modification pattern 34S: 5′-nnnnNfNfnnNfNfnnnnnnnnnsnsn-3′, wherein “Nf” is a 2′ fluoro-modified nucleoside, “n” is a 2′ O-methyl modified nucleoside, and “s” is a phosphorothioate linkage. In some embodiments, the sense strand comprises modification pattern 35S: 5′-nnnnNfNfnNfNfnnnnnnnnnnsnsn-3′, wherein “Nf” is a 2′ fluoro-modified nucleoside, “n” is a 2′ O-methyl modified nucleoside, and “s” is a phosphorothioate linkage. In some embodiments, the sense strand comprises modification pattern 36S: 5′-nnnnNfNfnNfNfnNfnnnnnnnnsnsn-3′, wherein “Nf” is a 2′ fluoro-modified nucleoside, “n” is a 2′ O-methyl modified nucleoside, and “s” is a phosphorothioate linkage. In some embodiments, the sense strand comprises modification pattern 37S: 5′-nnnnNfNfNfNfNfnnnnnnnnnnsnsn-3′, wherein “Nf” is a 2′ fluoro-modified nucleoside, “n” is a 2′ O-methyl modified nucleoside, and “s” is a phosphorothioate linkage. In some embodiments, the sense strand comprises modification pattern 38S: 5′-nnnnnnnnNfNfnnnnnnnnnsnsn-3′, wherein “Nf” is a 2′ fluoro-modified nucleoside, “n” is a 2′ O-methyl modified nucleoside, and “s” is a phosphorothioate linkage. In some embodiments, the sense strand comprises modification pattern 39S: 5′-nnnnnnnnNfnNfhnnnnnnnsnsn-3′, wherein “Nf” is a 2′ fluoro-modified nucleoside, “n” is a 2′ O-methyl modified nucleoside, and “s” is a phosphorothioate linkage. In some embodiments, the sense strand comprises modification pattern 40S: 5′-nnnnnnnnNfnnnnnnnnnnsnsn-3′, wherein “Nf” is a 2′ fluoro-modified nucleoside, “n” is a 2′ O-methyl modified nucleoside, and “s” is a phosphorothioate linkage. In some embodiments, the sense strand comprises modification pattern 41S: 5′-snnnnnNfnNfNfnnnnnnnnnnsnsn-3′, wherein “Nf” is a 2′ fluoro-modified nucleoside, “n” is a 2′ O-methyl modified nucleoside, and “s” is a phosphorothioate linkage. In some embodiments, the sense strand comprises modification pattern 42S: 5′-snnnnNfnNfnNfnnnnnnnnnnsnsn-3′, wherein “Nf” is a 2′ fluoro-modified nucleoside, “n” is a 2′ O-methyl modified nucleoside, and “s” is a phosphorothioate linkage. In some embodiments, the sense strand comprises modification pattern 43S: 5′-snnnnnnNfnNfnNfhnnnnnnnsnsn-3′, wherein “Nf” is a 2′ fluoro-modified nucleoside, “n” is a 2′ O-methyl modified nucleoside, and “s” is a phosphorothioate linkage. In some embodiments, the sense strand comprises modification pattern 44S: 5′-snnnnNfnNfNfdNNfnnnnnnnnnsnsn-3′, wherein “Nf” is a 2′ fluoro-modified nucleoside, “n” is a 2′ O-methyl modified nucleoside, “dN” comprises a deoxy nucleoside, and “s” is a phosphorothioate linkage. In some embodiments, the sense strand comprises modification pattern 45S: 5′-snnnnnNfnnNfnNfhnnnnnnnsnsn-3′, wherein “Nf” is a 2′ fluoro-modified nucleoside, “n” is a 2′ O-methyl modified nucleoside, and “s” is a phosphorothioate linkage. In some embodiments, the sense strand comprises modification pattern 46S: 5′-snnnnNfNfNfNfNfnnnnnnnnnnsnsn-3′, wherein “Nf” is a 2′ fluoro-modified nucleoside, “n” is a 2′ O-methyl modified nucleoside, and “s” is a phosphorothioate linkage. In some embodiments, the sense strand comprises modification pattern 47S: 5′-snnnnNfnnNfNfNfNfnnnnnnnnsnsn-3′, wherein “Nf” is a 2′ fluoro-modified nucleoside, “n” is a 2′ O-methyl modified nucleoside, and “s” is a phosphorothioate linkage. In some embodiments, the sense strand comprises modification pattern 48S: 5′-snnnnNfNfnnNfNfnnnnnnnnnsnsn-3′, wherein “Nf” is a 2′ fluoro-modified nucleoside, “n” is a 2′ O-methyl modified nucleoside, and “s” is a phosphorothioate linkage. In some embodiments, the sense strand comprises modification pattern 49S: 5′-snnnnNfnNfnNfNfhnnnnnnnnsnsn-3′, wherein “Nf” is a 2′ fluoro-modified nucleoside, “n” is a 2′ O-methyl modified nucleoside, and “s” is a phosphorothioate linkage. In some embodiments, the sense strand comprises modification pattern 50S: 5′-snnnnnNfNfNfNfnNfhnnnnnnnsnsn-3′, wherein “Nf” is a 2′ fluoro-modified nucleoside, “n” is a 2′ O-methyl modified nucleoside, and “s” is a phosphorothioate linkage. In some embodiments, the sense strand comprises modification pattern 51 S: 5′-snnnnnNfnnNfNfnnnnnnnnnsnsn-3′, wherein “Nf” is a 2′ fluoro-modified nucleoside, “n” is a 2′ O-methyl modified nucleoside, and “s” is a phosphorothioate linkage. In some embodiments, the sense strand comprises modification pattern 52S: 5′-snnnnnnNfNfNfNfnnnnnnnnnsnsn-3′, wherein “Nf” is a 2′ fluoro-modified nucleoside, “n” is a 2′ O-methyl modified nucleoside, and “s” is a phosphorothioate linkage. In some embodiments, the sense strand comprises modification pattern 53S: 5′-snnnnNfnnnNfNfnnnnnnnnnsnsn-3′, wherein “Nf” is a 2′ fluoro-modified nucleoside, “n” is a 2′ O-methyl modified nucleoside, and “s” is a phosphorothioate linkage. In some embodiments, the sense strand comprises modification pattern 54S: 5′-snnnnnNfNfnNfNfnnnnnnnnnsnsn-3′, wherein “Nf” is a 2′ fluoro-modified nucleoside, “n” is a 2′ O-methyl modified nucleoside, and “s” is a phosphorothioate linkage. In some embodiments, the sense strand comprises modification pattern 55S: 5′-snnnnNfnNfNfdNnNfnnnnnnnnsnsn-3′, wherein “Nf” is a 2′ fluoro-modified nucleoside, “n” is a 2′ O-methyl modified nucleoside, “dN” comprises a deoxy nucleoside, and “s” is a phosphorothioate linkage. In some embodiments, the sense strand comprises modification pattern 56S: 5′-snnnnNfnnnNfnNfnnnnnnnnsnsn-3′, wherein “Nf” is a 2′ fluoro-modified nucleoside, “n” is a 2′ O-methyl modified nucleoside, and “s” is a phosphorothioate linkage. In some embodiments, the sense strand comprises modification pattern 57S: 5′-snnnnNfNfnnNfnnnnnnnnnnsnsn-3′, wherein “Nf” is a 2′ fluoro-modified nucleoside, “n” is a 2′ O-methyl modified nucleoside, and “s” is a phosphorothioate linkage. In some embodiments, the sense strand comprises modification pattern 58S: 5′-snnnnNfnnNfNfnNfhnnnnnnnsnsn-3′, wherein “Nf” is a 2′ fluoro-modified nucleoside, “n” is a 2′ O-methyl modified nucleoside, and “s” is a phosphorothioate linkage.

[0126] In some embodiments, the composition comprises an oligonucleotide that inhibits the expression of SOS2 wherein the oligonucleotide comprises an siRNA comprising a sense strand and an antisense strand, wherein the antisense strand comprises modification pattern 1AS: 5′-nsNfsnNfnNfnNfnNfnnnNfnNfnNfnsnsn-3′, wherein “Nf” is a 2′ fluoro-modified nucleoside, “n” is a 2′ O-methyl modified nucleoside, and “s” is a phosphorothioate linkage. In some embodiments, the antisense strand comprises modification pattern 2AS: 5′-nsNfsnnnNfnNfNfnnnnNfnNfnnnsnsn-3′, wherein “Nf” is a 2′ fluoro-modified nucleoside, “n” is a 2′ O-methyl modified nucleoside, and “s” is a phosphorothioate linkage. In some embodiments, the antisense strand comprises modification pattern 3AS: 5′-nsNfsnnnNfnnnnnnnNfnNfnnnsnsn-3′, wherein “Nf” is a 2′ fluoro-modified nucleoside, “n” is a 2′ O-methyl modified nucleoside, and “s” is a phosphorothioate linkage. In some embodiments, the antisense strand comprises modification pattern 4AS: 5′-nsNfsnNfnNfnnnnnnnNfnNfnnnsnsn-3′, wherein “Nf” is a 2′ fluoro-modified nucleoside, “n” is a 2′ O-methyl modified nucleoside, and “s” is a phosphorothioate linkage. In some embodiments, the antisense strand comprises modification pattern 5AS: 5′-nsNfsnNfnNfnNfnNfnNfnNfnNfnNfnsnsn-3′, wherein “Nf” is a 2′ fluoro-modified nucleoside, “n” is a 2′ O-methyl modified nucleoside, and “s” is a phosphorothioate linkage.

[0127] In some embodiments, the composition comprises an oligonucleotide that inhibits the expression of SOS2 wherein the oligonucleotide comprises an siRNA comprising a sense strand and an antisense strand, wherein the sense strand comprises pattern 1S and the antisense strand comprises pattern 1AS, 2AS, 3AS, 4AS, 5AS. In some embodiments, the sense strand comprises pattern 2S and the antisense strand comprises pattern 1AS, 2AS, 3AS, 4AS, or 5AS. In some embodiments, the sense strand comprises pattern 3S and the antisense strand comprises pattern 1AS, 2AS, 3AS, 4AS, or 5AS. In some embodiments, the sense strand comprises pattern 4S and the antisense strand comprises pattern 1AS, 2AS, 3AS, 4AS, or 5AS. In some embodiments, the sense strand comprises pattern 5S and the antisense strand comprises pattern 1AS, 2AS, 3AS, 4AS, or 5AS. In some embodiments, the sense strand comprises pattern 6S and the antisense strand comprises pattern 1AS, 2AS, 3AS, 4AS, or 5AS. In some embodiments, the sense strand comprises pattern 7S and the antisense strand comprises pattern 1AS, 2AS, 3AS, 4AS, or 5AS. In some embodiments, the sense strand comprises pattern 8S and the antisense strand comprises pattern 1AS, 2AS, 3AS, 4AS, or 5AS. In some embodiments, the sense strand comprises pattern 9S and the antisense strand comprises pattern 1AS, 2AS, 3AS, 4AS, or 5AS. In some embodiments, the sense strand comprises pattern 10S and the antisense strand comprises pattern 1AS, 2AS, 3AS, 4AS, or 5AS. In some embodiments, the sense strand comprises pattern 11S and the antisense strand comprises pattern 1AS, 2AS, 3AS, 4AS, or 5AS. In some embodiments, the sense strand comprises pattern 12S and the antisense strand comprises pattern 1AS, 2AS, 3AS, 4AS, or 5AS. In some embodiments, the sense strand comprises pattern 13S and the antisense strand comprises pattern 1AS, 2AS, 3AS, 4AS, or 5AS. In some embodiments, the sense strand comprises pattern 14S and the antisense strand comprises pattern 1AS, 2AS, 3AS, 4AS, or 5AS. In some embodiments, the sense strand comprises pattern 15S and the antisense strand comprises pattern 1AS, 2AS, 3AS, 4AS, or 5AS. In some embodiments, the sense strand comprises pattern 16S and the antisense strand comprises pattern 1AS, 2AS, 3AS, 4AS, or 5AS. In some embodiments, the sense strand comprises pattern 17S and the antisense strand comprises pattern 1AS, 2AS, 3AS, 4AS, or 5AS. In some embodiments, the sense strand comprises pattern 18S and the antisense strand comprises pattern 1AS, 2AS, 3AS, 4AS, or 5AS. In some embodiments, the sense strand comprises pattern 19S and the antisense strand comprises pattern 1AS, 2AS, 3AS, 4AS, or 5AS. In some embodiments, the sense strand comprises pattern 20S and the antisense strand comprises pattern 1AS, 2AS, 3AS, 4AS, or 5AS. In some embodiments, the sense strand comprises pattern 21S and the antisense strand comprises pattern 1AS, 2AS, 3AS, 4AS, or 5AS. In some embodiments, the sense strand comprises pattern 22S and the antisense strand comprises pattern 1AS, 2AS, 3AS, 4AS, or 5AS. In some embodiments, the sense strand comprises pattern 23S and the antisense strand comprises pattern 1AS, 2AS, 3AS, 4AS, or 5AS. In some embodiments, the sense strand comprises pattern 24S and the antisense strand comprises pattern 1AS, 2AS, 3AS, 4AS, or 5AS. In some embodiments, the sense strand comprises pattern 25S and the antisense strand comprises pattern 1AS, 2AS, 3AS, 4AS, or 5AS. In some embodiments, the sense strand comprises pattern 26S and the antisense strand comprises pattern 1AS, 2AS, 3AS, 4AS, or 5AS. In some embodiments, the sense strand comprises pattern 27S and the antisense strand comprises pattern 1AS, 2AS, 3AS, 4AS, or 5AS. In some embodiments, the sense strand comprises pattern 28S and the antisense strand comprises pattern 1AS, 2AS, 3AS, 4AS, or 5AS. In some embodiments, the sense strand comprises pattern 29S and the antisense strand comprises pattern 1AS, 2AS, 3AS, 4AS, or 5AS. In some embodiments, the sense strand comprises pattern 30S and the antisense strand comprises pattern 1AS, 2AS, 3AS, 4AS, or 5AS. In some embodiments, the sense strand comprises pattern 31S and the antisense strand comprises pattern 1AS, 2AS, 3AS, 4AS, or 5AS. In some embodiments, the sense strand comprises pattern 32S and the antisense strand comprises pattern 1AS, 2AS, 3AS, 4AS, or 5AS. In some embodiments, the sense strand comprises pattern 33S and the antisense strand comprises pattern 1AS, 2AS, 3AS, 4AS, or 5AS. In some embodiments, the sense strand comprises pattern 34S and the antisense strand comprises pattern 1AS, 2AS, 3AS, 4AS, or 5AS. In some embodiments, the sense strand comprises pattern 35S and the antisense strand comprises pattern 1AS, 2AS, 3AS, 4AS, or 5AS. In some embodiments, the sense strand comprises pattern 36S and the antisense strand comprises pattern 1AS, 2AS, 3AS, 4AS, or 5AS. In some embodiments, the sense strand comprises pattern 37S and the antisense strand comprises pattern 1AS, 2AS, 3AS, 4AS, or 5AS. In some embodiments, the sense strand comprises pattern 38S and the antisense strand comprises pattern 1AS, 2AS, 3AS, 4AS, or 5AS. In some embodiments, the sense strand comprises pattern 39S and the antisense strand comprises pattern 1AS, 2AS, 3AS, 4AS, or 5AS. In some embodiments, the sense strand comprises pattern 40S and the antisense strand comprises pattern 1AS, 2AS, 3AS, 4AS, or 5AS. In some embodiments, the sense strand comprises pattern 41S and the antisense strand comprises pattern 1AS, 2AS, 3AS, 4AS, or 5AS. In some embodiments, the sense strand comprises pattern 42S and the antisense strand comprises pattern 1AS, 2AS, 3AS, 4AS, or 5AS. In some embodiments, the sense strand comprises pattern 43S and the antisense strand comprises pattern 1AS, 2AS, 3AS, 4AS, or 5AS. In some embodiments, the sense strand comprises pattern 44S and the antisense strand comprises pattern 1AS, 2AS, 3AS, 4AS, or 5AS. In some embodiments, the sense strand comprises pattern 45S and the antisense strand comprises pattern 1AS, 2AS, 3AS, 4AS, or 5AS. In some embodiments, the sense strand comprises pattern 46S and the antisense strand comprises pattern 1AS, 2AS, 3AS, 4AS, or 5AS. In some embodiments, the sense strand comprises pattern 47S and the antisense strand comprises pattern 1AS, 2AS, 3AS, 4AS, or 5AS. In some embodiments, the sense strand comprises pattern 48S and the antisense strand comprises pattern 1AS, 2AS, 3AS, 4AS, or 5AS. In some embodiments, the sense strand comprises pattern 49S and the antisense strand comprises pattern 1AS, 2AS, 3AS, 4AS, or 5AS. In some embodiments, the sense strand comprises pattern 50S and the antisense strand comprises pattern 1AS, 2AS, 3AS, 4AS, or 5AS. In some embodiments, the sense strand comprises pattern 51S and the antisense strand comprises pattern 1AS, 2AS, 3AS, 4AS, or 5AS. In some embodiments, the sense strand comprises pattern 52S and the antisense strand comprises pattern 1AS, 2AS, 3AS, 4AS, or 5AS. In some embodiments, the sense strand comprises pattern 53S and the antisense strand comprises pattern 1AS, 2AS, 3AS, 4AS, or 5AS. In some embodiments, the sense strand comprises pattern 54S and the antisense strand comprises pattern 1AS, 2AS, 3AS, 4AS, or 5AS. In some embodiments, the sense strand comprises pattern 55S and the antisense strand comprises pattern 1AS, 2AS, 3AS, 4AS, or 5AS. In some embodiments, the sense strand comprises pattern 56S and the antisense strand comprises pattern 1AS, 2AS, 3AS, 4AS, or 5AS. In some embodiments, the sense strand comprises pattern 57S and the antisense strand comprises pattern 1AS, 2AS, 3AS, 4AS, or 5AS. In some embodiments, the sense strand comprises pattern 58S and the antisense strand comprises pattern 1AS, 2AS, 3AS, 4AS, or 5AS. In some embodiments, the sense strand comprises modification pattern 1S, 2S, 3S, 4S, 5S, 6S, 7S, 8S, 9S, 10S, 11S, 12S, 13S, 14S, 15S, 16S, 17S, 18S, 19S, 20S, 21S, 22S, 23S, 24S, 25S, 26S, 27S, 28S, 29S, 30S, 31S, 32S, 33S, 34S, 35S, 36S, 37S, 39S, or 40S. In some embodiments, the sense strand comprises modification pattern 1S, 2S, 3S, 4S, 5S, 6S, 7S, 8S, 9S, 10S, 11S, 12S, 13S, 14S, 15S, 16S, 17S, 18S, 19S, 20S, 21S, 22S, 23S, 24S, 25S, 26S, 27S, 28S, 29S, 30S, 31S, 32S, 33S, 34S, 35S, 36S, 37S, 39S, 40S, 41S, 42S, 43S, 44S, 45S, 46S, 47S, 48S, 49S, 50S, 51S, 52S, 53S, 54S, 55S, 56S, 57S, or 58S. In some embodiments, the sense strand comprises modification pattern 1AS, 2AS, 3AS, 4AS, or 5AS. In some embodiments, the antisense strand comprises modification pattern 1AS, 2AS, 3AS, 4AS, or 5AS. In some embodiments, the antisense strand comprises modification pattern 1S, 2S, 3S, 4S, 5S, 6S, 7S, 8S, 9S, 10S, 11S, 12S, 13S, 14S, 15S, 16S, 17S, 18S, 19S, 20S, 21S, 22S, 23S, 24S, 25S, 26S, 27S, 28S, 29S, 30S, 31S, 32S, 33S, 34S, 35S, 36S, 37S, 39S, 40S, 41S, 42S, 43S, 44S, 45S, 46S, 47S, 48S, 49S, 50S, 51S, 52S, 53S, 54S, 55S, 56S, 57S, or 58S. In some embodiments, the sense strand or the antisense strand comprises modification pattern ASO1.

[0128] The oligonucleotide may include purines. Examples of purines include adenine (A) or guanine (G), or modified versions thereof. The oligonucleotide may include pyrimidines. Examples of pyrimidines include cytosine (C), thymine (T), or uracil (U), or modified versions thereof.

[0129] In some embodiments, purines of the oligonucleotide comprise 2′-fluoro modified purines. In some embodiments, purines of the oligonucleotide comprise 2′-O-methyl modified purines. In some embodiments, purines of the oligonucleotide comprise a mixture of 2′-fluoro and 2′-O-methyl modified purines. In some embodiments, all purines of the oligonucleotide comprise 2′-fluoro modified purines. In some embodiments, all purines of the oligonucleotide comprise 2′-O-methyl modified purines. In some embodiments, all purines of the oligonucleotide comprise a mixture of 2′-fluoro and 2′-O-methyl modified purines.

[0130] In some embodiments, pyrimidines of the oligonucleotide comprise 2′-fluoro modified pyrimidines. In some embodiments, pyrimidines of the oligonucleotide comprise 2′-O-methyl modified pyrimidines. In some embodiments, pyrimidines of the oligonucleotide comprise a mixture of 2′-fluoro and 2′-O-methyl modified pyrimidines. In some embodiments, all pyrimidines of the oligonucleotide comprise 2′-fluoro modified pyrimidines. In some embodiments, all pyrimidines of the oligonucleotide comprise 2′-O-methyl modified pyrimidines. In some embodiments, all pyrimidines of the oligonucleotide comprise a mixture of 2′-fluoro and 2′-O-methyl modified pyrimidines.

[0131] In some embodiments, purines of the oligonucleotide comprise 2′-fluoro modified purines, and pyrimidines of the oligonucleotide comprise a mixture of 2′-fluoro and 2′-O-methyl modified pyrimidines. In some embodiments, purines of the oligonucleotide comprise 2′-O-methyl modified purines, and pyrimidines of the oligonucleotide comprise a mixture of 2′-fluoro and 2′-O-methyl modified pyrimidines. In some embodiments, purines of the oligonucleotide comprise 2′-fluoro modified purines, and pyrimidines of the oligonucleotide comprise 2′-O-methyl modified pyrimidines. In some embodiments, purines of the oligonucleotide comprise 2′-O-methyl modified purines, and pyrimidines of the oligonucleotide comprise 2′-fluoro modified pyrimidines. In some embodiments, pyrimidines of the oligonucleotide comprise 2′-fluoro modified pyrimidines, and purines of the oligonucleotide comprise a mixture of 2′-fluoro and 2′-O-methyl modified purines. In some embodiments, pyrimidines of the oligonucleotide comprise 2′-O-methyl modified pyrimidines, and purines of the oligonucleotide comprise a mixture of 2′-fluoro and 2′-O-methyl modified purines. In some embodiments, pyrimidines of the oligonucleotide comprise 2′-fluoro modified pyrimidines, and purines of the oligonucleotide comprise 2′-O-methyl modified purines. In some embodiments, pyrimidines of the oligonucleotide comprise 2′-O-methyl modified pyrimidines, and purines of the oligonucleotide comprise 2′-fluoro modified purines.

[0132] In some embodiments, all purines of the oligonucleotide comprise 2′-fluoro modified purines, and all pyrimidines of the oligonucleotide comprise a mixture of 2′-fluoro and 2′-O-methyl modified pyrimidines. In some embodiments, all purines of the oligonucleotide comprise 2′-O-methyl modified purines, and all pyrimidines of the oligonucleotide comprise a mixture of 2′-fluoro and 2′-O-methyl modified pyrimidines. In some embodiments, all purines of the oligonucleotide comprise 2′-fluoro modified purines, and all pyrimidines of the oligonucleotide comprise 2′-O-methyl modified pyrimidines. In some embodiments, all purines of the oligonucleotide comprise 2′-O-methyl modified purines, and all pyrimidines of the oligonucleotide comprise 2′-fluoro modified pyrimidines. In some embodiments, all pyrimidines of the oligonucleotide comprise 2′-fluoro modified pyrimidines, and all purines of the oligonucleotide comprise a mixture of 2′-fluoro and 2′-O-methyl modified purines. In some embodiments, all pyrimidines of the oligonucleotide comprise 2′-O-methyl modified pyrimidines, and all purines of the oligonucleotide comprise a mixture of 2′-fluoro and 2′-O-methyl modified purines. In some embodiments, all pyrimidines of the oligonucleotide comprise 2′-fluoro modified pyrimidines, and all purines of the oligonucleotide comprise 2′-O-methyl modified purines. In some embodiments, all pyrimidines of the oligonucleotide comprise 2′-O-methyl modified pyrimidines, and all purines of the oligonucleotide comprise 2′-fluoro modified purines.

[0133] In some embodiments, position nine of the sense strand comprises a 2′ fluoro-modified pyrimidine. In some embodiments, all purines of the sense strand comprise 2′-O-methyl modified purines. In some embodiments, 1, 2, 3, 4, or 5 pyrimidines between positions 5 and 11 comprise a 2′flouro-modified pyrimidine, provided there are never three 2′ fluoro-modified pyrimidines in a row. In some embodiments, the odd-numbered positions of the antisense strand comprise 2′-O-methyl modified nucleotides. In some embodiments, the even-numbered positions of the antisense strand comprise 2′flouro-modified nucleotides and unmodified deoxyribonucleotide. In some embodiments, position nine of the sense strand comprises a 2′ fluoro-modified pyrimidine; all purines of the sense strand comprises 2′-O-methyl modified purines; 1, 2, 3, 4, or 5 pyrimidines between positions 5 and 11 comprise a 2′flouro-modified pyrimidine, provided there are never three 2′ fluoro-modified pyrimidines in a row; the odd-numbered positions of the antisense strand comprise 2′-O-methyl modified nucleotides; and the even-numbered positions of the antisense strand comprise 2′flouro-modified nucleotides and unmodified deoxyribonucleotides.

[0134] In some embodiments, position nine of the sense strand comprises a 2′ fluoro-modified purine. In some embodiments, all pyrimidines of the sense strand comprise 2′-O-methyl modified purines. In some embodiments, 1, 2, 3, 4, or 5 purines between positions 5 and 11 comprise a 2′flouro-modified purine, provided there are never three 2′ fluoro-modified purine in a row. In some embodiments, the odd-numbered positions of the antisense strand comprise 2′-O-methyl modified nucleotides. In some embodiments, the even-numbered positions of the antisense strand comprise 2′flouro-modified nucleotides and unmodified deoxyribonucleotide. In some embodiments, position nine of the sense strand comprises a 2′ fluoro-modified purine; all pyrimidine of the sense strand comprises 2′-O-methyl modified pyrimidines; 1, 2, 3, 4, or 5 purines between positions 5 and 11 comprise a 2′flouro-modified purines, provided there are never three 2′ fluoro-modified purines in a row; the odd-numbered positions of the antisense strand comprise 2′-O-methyl modified nucleotides; and the even-numbered positions of the antisense strand comprise 2′flouro-modified nucleotides and unmodified deoxyribonucleotides.

[0135] In some embodiments, position nine of the sense strand comprises an unmodified deoxyribonucleotide. In some embodiments, positions 5, 7, and 8 of the sense strand comprise 2′fluoro-modified nucleotides. In some embodiments, all pyrimidines in positions 10 to 21 of the sense strand comprise 2′-O-methyl modified pyrimidines and all purines in positions 10 to 21 of the comprise 2′-O-methyl modified purines or 2′fluoro-modified purines. In some embodiments, the odd-numbered positions of the antisense strand comprise 2′-O-methyl modified nucleotides. In some embodiments, the even-numbered positions of the antisense strand comprise 2′flouro-modified nucleotides and unmodified deoxyribonucleotides. In some embodiments, position nine of the sense strand comprises an unmodified deoxyribonucleotide; positions 5, 7, and 8 of the sense strand comprise 2′fluoro-modified nucleotides; all pyrimidines in positions 10 to 21 of the sense strand comprise 2′-O-methyl modified pyrimidines and all purines in positions 10 to 21 of the comprise 2′-O-methyl modified purines or 2′fluoro-modified purines; the odd-numbered positions of the antisense strand comprise 2′-O-methyl modified nucleotides; and the even-numbered positions of the antisense strand comprise 2′flouro-modified nucleotides and unmodified deoxyribonucleotides.

[0136] In some embodiments, position nine of the sense strand comprises an unmodified deoxyribonucleotide. In some embodiments, positions 5, 7, and 8 of the sense strand comprise 2′fluoro-modified nucleotides. In some embodiments, all purines in positions 10 to 21 of the sense strand comprise 2′-O-methyl modified purines and all pyrimidines in positions 10 to 21 of the comprise 2′-O-methyl modified pyrimidines or 2′fluoro-modified pyrimidines. In some embodiments, the odd-numbered positions of the antisense strand comprise 2′-O-methyl modified nucleotides. In some embodiments, the even-numbered positions of the antisense strand comprise 2′flouro-modified nucleotides and unmodified deoxyribonucleotides. In some embodiments, position nine of the sense strand comprises an unmodified deoxyribonucleotide; positions 5, 7, and 8 of the sense strand comprise 2′fluoro-modified nucleotides; all purines in positions 10 to 21 of the sense strand comprise 2′-O-methyl modified purines and all pyrimidines in positions 10 to 21 of the comprise 2′-O-methyl modified pyrimidines or 2′fluoro-modified pyrimidines; the odd-numbered positions of the antisense strand comprise 2′-O-methyl modified nucleotides; and the even-numbered positions of the antisense strand comprise 2′flouro-modified nucleotides and unmodified deoxyribonucleotides.

[0137] In some embodiments, the sense strand comprises or consists of a sequence at least 75% identical to of any one of SEQ ID NOs: 10981-11000, 11021-11115, 11091-11115, or 11141-11252, at least 80% identical to of any one of SEQ ID NOs: 10981-11000, 11021-11115, 11091-11115, or 11141-11252, at least 85% identical to of any one of SEQ ID NOs: 10981-11000, 11021-11115, 11091-11115, or 11141-11252, at least 90% identical to of any one of SEQ ID NOs: 10981-11000, 11021-11115, 11091-11115, or 11141-11252, or at least 95% identical to of any one of SEQ ID NOs: 10981-11000, 11021-11115, 11091-11115, or 11141-11252. In some embodiments, the sense strand comprises or consists of the sequence of any one of SEQ ID NOs: 10981-11000, 11021-11115, 11091-11115, or 11141-11252, or a sequence thereof having 1, 2, 3, or 4 nucleoside substitutions, additions, or deletions. In some embodiments, the sense strand comprises or consists of the sequence of any one of SEQ ID NOs: 10981-11000, 11021-11115, 11091-11115, or 11141-11252, or a sequence thereof having 1 or 2 nucleoside substitutions, additions, or deletions. In some embodiments, the sense strand comprises or consists of the sequence of any one of SEQ ID NOs: 10981-11000, 11021-11115, 11091-11115, or 11141-11252. In some embodiments, the sense strand is an unmodified version of a nucleic acid sequence described herein. In some embodiments, the sense strand has more or different sequence modifications than a nucleic acid sequence described herein.

[0138] In some embodiments, the antisense strand comprises or consists of a sequence at least 75% identical to of any one of SEQ ID NOs: 11001-11020 or 11116-11140, at least 80% identical to of any one of SEQ ID NOs: 11001-11020 or 11116-11140, at least 85% identical to of any one of SEQ ID NOs: 11001-11020 or 11116-11140, at least 90% identical to of any one of SEQ ID NOs: 11001-11020 or 11116-11140, or at least 95% identical to of any one of SEQ ID NOs: 11001-11020 or 11116-11140. In some embodiments, the antisense strand comprises or consists of the sequence of any one of SEQ ID NOs: 11001-11020 or 11116-11140 or a sequence thereof having 1, 2, 3, or 4 nucleoside substitutions, additions, or deletions. In some embodiments, the antisense strand comprises or consists of the sequence of any one of SEQ ID NOs: 11001-11020 or 11116-11140, or a sequence thereof having 1 or 2 nucleoside substitutions, additions, or deletions. In some embodiments, the antisense strand comprises or consists of the sequence of any one of SEQ ID NOs: 11001-11020 or 11116-11140. In some embodiments, the antisense strand is an unmodified version of a nucleic acid sequence described herein. In some embodiments, the antisense strand has more or different sequence modifications than a nucleic acid sequence described herein.

[0139] In some embodiments, the sense strand sequence comprises or consists of a sense strand sequence of any one of the siRNAs disclosed in Tables 15-25, or an siRNA thereof having 1 or 2 nucleoside substitutions, additions, or deletions. In some embodiments, the sense strand sequence comprises or consists of a sense strand sequence of any one of the siRNAs disclosed in Tables 15-25. In some embodiments, the sense strand sequence comprises or consists of a sense strand sequence of any one of the siRNAs disclosed in Table 15, or an siRNA thereof having 1 or 2 nucleoside substitutions, additions, or deletions. In some embodiments, the sense strand sequence comprises or consists of a sense strand sequence of any one of the siRNAs disclosed in Table 15. In some embodiments, the sense strand sequence comprises or consists of a sense strand sequence of any one of the siRNAs disclosed in Table 16, or an siRNA thereof having 1 or 2 nucleoside substitutions, additions, or deletions. In some embodiments, the sense strand sequence comprises or consists of a sense strand sequence of any one of the siRNAs disclosed in Table 16. In some embodiments, the sense strand sequence comprises or consists of a sense strand sequence of any one of the siRNAs disclosed in Table 17, or an siRNA thereof having 1 or 2 nucleoside substitutions, additions, or deletions. In some embodiments, the sense strand sequence comprises or consists of a sense strand sequence of any one of the siRNAs disclosed in Table 17. In some embodiments, the sense strand sequence comprises or consists of a sense strand sequence of any one of the siRNAs disclosed in Table 18, or an siRNA thereof having 1 or 2 nucleoside substitutions, additions, or deletions. In some embodiments, the sense strand sequence comprises or consists of a sense strand sequence of any one of the siRNAs disclosed in Table 18. In some embodiments, the sense strand sequence comprises or consists of a sense strand sequence of any one of the siRNAs disclosed in Table 19, or an siRNA thereof having 1 or 2 nucleoside substitutions, additions, or deletions. In some embodiments, the sense strand sequence comprises or consists of a sense strand sequence of any one of the siRNAs disclosed in Table 19. In some embodiments, the sense strand sequence comprises or consists of a sense strand sequence of any one of the siRNAs disclosed in Table 20, or an siRNA thereof having 1 or 2 nucleoside substitutions, additions, or deletions. In some embodiments, the sense strand sequence comprises or consists of a sense strand sequence of any one of the siRNAs disclosed in Table 20. In some embodiments, the sense strand sequence comprises or consists of a sense strand sequence of any one of the siRNAs disclosed in Table 21, or an siRNA thereof having 1 or 2 nucleoside substitutions, additions, or deletions. In some embodiments, the sense strand sequence comprises or consists of a sense strand sequence of any one of the siRNAs disclosed in Table 21. In some embodiments, the sense strand sequence comprises or consists of a sense strand sequence of any one of the siRNAs disclosed in Table 22, or an siRNA thereof having 1 or 2 nucleoside substitutions, additions, or deletions. In some embodiments, the sense strand sequence comprises or consists of a sense strand sequence of any one of the siRNAs disclosed in Table 22. In some embodiments, the sense strand sequence comprises or consists of a sense strand sequence of any one of the siRNAs disclosed in Table 23, or an siRNA thereof having 1 or 2 nucleoside substitutions, additions, or deletions. In some embodiments, the sense strand sequence comprises or consists of a sense strand sequence of any one of the siRNAs disclosed in Table 23. In some embodiments, the sense strand sequence comprises or consists of a sense strand sequence of any one of the siRNAs disclosed in Table 24, or an siRNA thereof having 1 or 2 nucleoside substitutions, additions, or deletions. In some embodiments, the sense strand sequence comprises or consists of a sense strand sequence of any one of the siRNAs disclosed in Table 24. In some embodiments, the sense strand sequence comprises or consists of a sense strand sequence of any one of the siRNAs disclosed in Table 25, or an siRNA thereof having 1 or 2 nucleoside substitutions, additions, or deletions. In some embodiments, the sense strand sequence comprises or consists of a sense strand sequence of any one of the siRNAs disclosed in Table 25.

[0140] In some embodiments, the antisense strand sequence comprises or consists of an antisense strand sequence of any one of the siRNAs disclosed in Tables 15-25, or an siRNA thereof having 1 or 2 nucleoside substitutions, additions, or deletions. In some embodiments, the antisense strand sequence comprises or consists of an antisense strand sequence of any one of the siRNAs disclosed in Tables 15-25. In some embodiments, the antisense strand sequence comprises or consists of an antisense strand sequence of any one of the siRNAs disclosed in Table 15, or an siRNA thereof having 1 or 2 nucleoside substitutions, additions, or deletions. In some embodiments, the antisense strand sequence comprises or consists of an antisense strand sequence of any one of the siRNAs disclosed in Table 15. In some embodiments, the antisense strand sequence comprises or consists of an antisense strand sequence of any one of the siRNAs disclosed in Table 16, or an siRNA thereof having 1 or 2 nucleoside substitutions, additions, or deletions. In some embodiments, the antisense strand sequence comprises or consists of an antisense strand sequence of any one of the siRNAs disclosed in Table 16. In some embodiments, the antisense strand sequence comprises or consists of an antisense strand sequence of any one of the siRNAs disclosed in Table 17, or an siRNA thereof having 1 or 2 nucleoside substitutions, additions, or deletions. In some embodiments, the antisense strand sequence comprises or consists of an antisense strand sequence of any one of the siRNAs disclosed in Table 17. In some embodiments, the antisense strand sequence comprises or consists of an antisense strand sequence of any one of the siRNAs disclosed in Table 18, or an siRNA thereof having 1 or 2 nucleoside substitutions, additions, or deletions. In some embodiments, the antisense strand sequence comprises or consists of an antisense strand sequence of any one of the siRNAs disclosed in Table 18. In some embodiments, the antisense strand sequence comprises or consists of an antisense strand sequence of any one of the siRNAs disclosed in Table 19, or an siRNA thereof having 1 or 2 nucleoside substitutions, additions, or deletions. In some embodiments, the antisense strand sequence comprises or consists of an antisense strand sequence of any one of the siRNAs disclosed in Table 19. In some embodiments, the antisense strand sequence comprises or consists of an antisense strand sequence of any one of the siRNAs disclosed in Table 20, or an siRNA thereof having 1 or 2 nucleoside substitutions, additions, or deletions. In some embodiments, the antisense strand sequence comprises or consists of an antisense strand sequence of any one of the siRNAs disclosed in Table 20. In some embodiments, the antisense strand sequence comprises or consists of an antisense strand sequence of any one of the siRNAs disclosed in Table 21, or an siRNA thereof having 1 or 2 nucleoside substitutions, additions, or deletions. In some embodiments, the antisense strand sequence comprises or consists of an antisense strand sequence of any one of the siRNAs disclosed in Table 21. In some embodiments, the antisense strand sequence comprises or consists of an antisense strand sequence of any one of the siRNAs disclosed in Table 22, or an siRNA thereof having 1 or 2 nucleoside substitutions, additions, or deletions. In some embodiments, the antisense strand sequence comprises or consists of an antisense strand sequence of any one of the siRNAs disclosed in Table 22. In some embodiments, the antisense strand sequence comprises or consists of an antisense strand sequence of any one of the siRNAs disclosed in Table 23, or an siRNA thereof having 1 or 2 nucleoside substitutions, additions, or deletions. In some embodiments, the antisense strand sequence comprises or consists of an antisense strand sequence of any one of the siRNAs disclosed in Table 23. In some embodiments, the antisense strand sequence comprises or consists of an antisense strand sequence of any one of the siRNAs disclosed in Table 24, or an siRNA thereof having 1 or 2 nucleoside substitutions, additions, or deletions. In some embodiments, the antisense strand sequence comprises or consists of an antisense strand sequence of any one of the siRNAs disclosed in Table 24. In some embodiments, the antisense strand sequence comprises or consists of an antisense strand sequence of any one of the siRNAs disclosed in Table 25, or an siRNA thereof having 1 or 2 nucleoside substitutions, additions, or deletions. In some embodiments, the antisense strand sequence comprises or consists of an antisense strand sequence of any one of the siRNAs disclosed in Table 25.

[0141] In some embodiments, the sense strand includes a nucleoside sequence of a sense strand in any of Tables 21-25 and omits an A, U, UU, or AUU. For example, a sense strand may omit a 3′ AUU of a sense strand sequence in any of Tables 21-25. In some embodiments, the sense strand comprises the nucleoside sequence of positions 1-18 of a sense strand sequence in any of Tables 21-25. In some embodiments, the sense strand comprises a sequence at least 80%, at least 85%, at least 90%, or at least 95% identical to the nucleoside sequence of positions 1-18 of a sense strand sequence in any of Tables 21-25. In some embodiments, the sense strand comprises the nucleoside sequence of positions 1-18 of a sense strand sequence in any of Tables 21-25, or a sequence comprising 1 or 2 nucleoside substitutions, additions, or deletions. In some embodiments, the sense strand comprises the nucleoside sequence of positions 1-18 of a sense strand sequence in any of Tables 21-25, or a sequence comprising 3 or 4 nucleoside substitutions, additions, or deletions.

[0142] A sense strand sequence may omit a 3′ AUU of a sense strand sequence in Table 21. In some embodiments, the sense strand comprises the nucleoside sequence of positions 1-18 of a sense strand in Table 21. In some embodiments, the sense strand comprises the nucleoside sequence of positions 1-19 of a sense strand in Table 21. In some embodiments, the sense strand comprises the nucleoside sequence of positions 1-20 of a sense strand of Table 21. In some embodiments, the sense strand comprises a sequence that is at least 90% identical to a nucleoside sequence in Table 21 omitting an AUU sequence. In some embodiments, the sense strand can be a nucleoside sequence that is at least 90% identical to a nucleoside sequence in Table 21 and omits at least one nucleoside comprising an A, a U, a UU, or an AUU.

[0143] A sense strand sequence may omit a 3′ AUU of a sense strand sequence in Table 22. In some embodiments, the sense strand comprises the nucleoside sequence of positions 1-18 of a sense strand in Table 22. In some embodiments, the sense strand comprises the nucleoside sequence of positions 1-19 of a sense strand in Table 22. In some embodiments, the sense strand comprises the nucleoside sequence of positions 1-20 of a sense strand of Table 22. In some embodiments, the sense strand comprises a sequence that is at least 90% identical to a nucleoside sequence in Table 22 omitting an AUU sequence. In some embodiments, the sense strand can be a nucleoside sequence that is at least 90% identical to a nucleoside sequence in Table 22 and omits at least one nucleoside comprising an A, a U, a UU, or an AUU.

[0144] A sense strand sequence may omit a 3′ AUU of a sense strand sequence in Table 23. In some embodiments, the sense strand comprises the nucleoside sequence of positions 1-18 of a sense strand in Table 23. In some embodiments, the sense strand comprises the nucleoside sequence of positions 1-19 of a sense strand in Table 23. In some embodiments, the sense strand comprises the nucleoside sequence of positions 1-20 of a sense strand of Table 23. In some embodiments, the sense strand comprises a sequence that is at least 90% identical to a nucleoside sequence in Table 23 omitting an AUU sequence. In some embodiments, the sense strand can be a nucleoside sequence that is at least 90% identical to a nucleoside sequence in Table 23 and omits at least one nucleoside comprising an A, a U, a UU, or an AUU.

[0145] A sense strand sequence may omit a 3′ AUU of a sense strand sequence in Table 24. In some embodiments, the sense strand comprises the nucleoside sequence of positions 1-18 of a sense strand in Table 24. In some embodiments, the sense strand comprises the nucleoside sequence of positions 1-19 of a sense strand in Table 24. In some embodiments, the sense strand comprises the nucleoside sequence of positions 1-20 of a sense strand of Table 24. In some embodiments, the sense strand comprises a sequence that is at least 90% identical to a nucleoside sequence in Table 24 omitting an AUU sequence. In some embodiments, the sense strand can be a nucleoside sequence that is at least 90% identical to a nucleoside sequence in Table 24 and omits at least one nucleoside comprising an A, a U, a UU, or an AUU.

[0146] A sense strand sequence may omit a 3′ AUU of a sense strand sequence in Table 25. In some embodiments, the sense strand comprises the nucleoside sequence of positions 1-18 of a sense strand in Table 25. In some embodiments, the sense strand comprises the nucleoside sequence of positions 1-19 of a sense strand in Table 25. In some embodiments, the sense strand comprises the nucleoside sequence of positions 1-20 of a sense strand of Table 25. In some embodiments, the sense strand comprises a sequence that is at least 90% identical to a nucleoside sequence in Table 25 omitting an AUU sequence. In some embodiments, the sense strand can be a nucleoside sequence that is at least 90% identical to a nucleoside sequence in Table 25 and omits at least one nucleoside comprising an A, a U, a UU, or an AUU.

[0147] In some embodiments, the antisense strand includes a nucleoside sequence of an antisense strand in any of Tables 21-25 and omits a U or UU. For example, an antisense strand may omit a 5′ U and a 3′ UU of an antisense strand sequence in any of Tables 21-25. In some embodiments, the antisense strand comprises the nucleoside sequence of positions 2-19 of an antisense strand sequence in any of Tables 21-25. In some embodiments, the antisense strand comprises a sequence at least 80%, at least 85%, at least 90%, or at least 95% identical to the nucleoside sequence of positions 2-19 of an antisense strand sequence in any of Tables 21-25. In some embodiments, the antisense strand comprises the nucleoside sequence of positions 2-19 of an antisense strand sequence in any of Tables 21-25, or a sequence comprising 1 or 2 nucleoside substitutions, additions, or deletions. In some embodiments, the antisense strand comprises the nucleoside sequence of positions 2-19 of an antisense strand sequence in any of Tables 21-25, or a sequence comprising 3 or 4 nucleoside substitutions, additions, or deletions.

[0148] An antisense strand sequence may omit a 5′ U and 3′ UU of an antisense strand sequence in Table 21. In some embodiments, the antisense strand comprises the nucleoside sequence of positions 1-18 of an antisense strand in Table 21. In some embodiments, the antisense strand comprises the nucleoside sequence of positions 2-19 of an antisense strand in Table 21. In some embodiments, the antisense strand comprises the nucleoside sequence of positions 2-21 of an antisense strand of Table 21. In some embodiments, the antisense strand comprises a sequence that is at least 90% identical to a nucleoside sequence in Table 21 omitting a 5′ U and a 3′ UU. In some embodiments, the antisense strand can be a nucleoside sequence that is at least 90% identical to a nucleoside sequence in Table 21 and omits at least one nucleoside comprising a U or UU.

[0149] An antisense strand sequence may omit a 5′ U and 3′ UU of an antisense strand sequence in Table 22. In some embodiments, the antisense strand comprises the nucleoside sequence of positions 1-18 of an antisense strand in Table 22. In some embodiments, the antisense strand comprises the nucleoside sequence of positions 2-19 of an antisense strand in Table 22. In some embodiments, the antisense strand comprises the nucleoside sequence of positions 2-21 of an antisense strand of Table 22. In some embodiments, the antisense strand comprises a sequence that is at least 90% identical to a nucleoside sequence in Table 22 omitting a 5′ U and a 3′ UU. In some embodiments, the antisense strand can be a nucleoside sequence that is at least 90% identical to a nucleoside sequence in Table 22 and omits at least one nucleoside comprising a U or UU.

[0150] An antisense strand sequence may omit a 5′ U and 3′ UU of an antisense strand sequence in Table 23. In some embodiments, the antisense strand comprises the nucleoside sequence of positions 1-18 of an antisense strand in Table 23. In some embodiments, the antisense strand comprises the nucleoside sequence of positions 2-19 of an antisense strand in Table 23. In some embodiments, the antisense strand comprises the nucleoside sequence of positions 2-21 of an antisense strand of Table 23. In some embodiments, the antisense strand comprises a sequence that is at least 90% identical to a nucleoside sequence in Table 23 omitting a 5′ U and a 3′ UU. In some embodiments, the antisense strand can be a nucleoside sequence that is at least 90% identical to a nucleoside sequence in Table 23 and omits at least one nucleoside comprising a U or UU.

[0151] An antisense strand sequence may omit a 5′ U and 3′ UU of an antisense strand sequence in Table 24. In some embodiments, the antisense strand comprises the nucleoside sequence of positions 1-18 of an antisense strand in Table 24. In some embodiments, the antisense strand comprises the nucleoside sequence of positions 2-19 of an antisense strand in Table 24. In some embodiments, the antisense strand comprises the nucleoside sequence of positions 2-21 of an antisense strand of Table 24. In some embodiments, the antisense strand comprises a sequence that is at least 90% identical to a nucleoside sequence in Table 24 omitting a 5′ U and a 3′ UU. In some embodiments, the antisense strand can be a nucleoside sequence that is at least 90% identical to a nucleoside sequence in Table 24 and omits at least one nucleoside comprising a U or UU.

[0152] An antisense strand sequence may omit a 5′ U and 3′ UU of an antisense strand sequence in Table 25. In some embodiments, the antisense strand comprises the nucleoside sequence of positions 1-18 of an antisense strand in Table 25. In some embodiments, the antisense strand comprises the nucleoside sequence of positions 2-19 of an antisense strand in Table 25. In some embodiments, the antisense strand comprises the nucleoside sequence of positions 2-21 of an antisense strand of Table 25. In some embodiments, the antisense strand comprises a sequence that is at least 90% identical to a nucleoside sequence in Table 25 omitting a 5′ U and a 3′ UU. In some embodiments, the antisense strand can be a nucleoside sequence that is at least 90% identical to a nucleoside sequence in Table 25 and omits at least one nucleoside comprising a U or UU.

[0153] In some embodiments, the siRNA comprises a sense strand or antisense strand having a sequence in accordance with the sense strand or antisense strand sequence of an siRNA in Table 27. In some embodiments, the sense strand or antisense strand comprises a sequence at least 750% identical, at least 80% identical, at least 85% identical, at least 90% identical, or at least 95% identical, to a sense strand or antisense strand sequence in Table 27. In some embodiments, the sense strand or antisense strand comprises a sequence of a sense or antisense strand in Table 27, or a sequence thereof having 3 or 4 nucleoside substitutions, additions, or deletions. In some embodiments, the sense strand or antisense strand comprises a sequence of a sense or antisense strand in Table 27, or a sequence thereof having 1 or 2 nucleoside substitutions, additions, or deletions. In some embodiments, the sense strand or antisense sequence comprises or consists of a sequence 100% identical to a sense strand or antisense strand sequence in Table 27. The sense strand or antisense strand may comprise any modifications described herein. The sense strand or antisense strand may comprise a lipid moiety or a GalNAc moiety.

[0154] In some embodiments, the siRNA comprises a sense strand or antisense strand having a sequence in accordance with the sense strand or antisense strand sequence of an siRNA in Table 31. In some embodiments, the sense strand or antisense strand comprises a sequence at least 75% identical, at least 80% identical, at least 85% identical, at least 90% identical, or at least 95% identical, to a sense strand or antisense strand sequence in Table 31. In some embodiments, the sense strand or antisense strand comprises a sequence of a sense or antisense strand in Table 31, or a sequence thereof having 3 or 4 nucleoside substitutions, additions, or deletions. In some embodiments, the sense strand or antisense strand comprises a sequence of a sense or antisense strand in Table 31, or a sequence thereof having 1 or 2 nucleoside substitutions, additions, or deletions. In some embodiments, the sense strand or antisense sequence comprises or consists of a sequence 100% identical to a sense strand or antisense strand sequence in Table 31. The sense strand or antisense strand may comprise any modifications described herein. The sense strand or antisense strand may comprise a lipid moiety or a GalNAc moiety.

[0155] In some embodiments, the siRNA comprises a sense strand having a sequence in accordance with any of SEQ ID NOs: 10981-11000. In some embodiments, the sense strand sequence comprises or consists of sequence at least 75% identical to any one of SEQ ID NOs: 10981-11000, at least 80% identical to any one of SEQ ID NOs: 10981-11000, at least 85% identical to of any one of SEQ ID NOs: 10981-11000, at least 90% identical to any one of SEQ ID NOs: 1-5490, or at least 95% identical to any one of SEQ ID NOs: 10981-11000. In some embodiments, the sense strand sequence comprises or consists of the sequence of any one of SEQ ID NOs: 10981-11000, or a sense strand sequence thereof having 1, 2, 3, or 4 nucleoside substitutions, additions, or deletions. In some embodiments, the sense strand sequence comprises or consists of the sequence of any one of SEQ ID NOs: 10981-11000, or a sense strand sequence thereof having 1 or 2 nucleoside substitutions, additions, or deletions. In some embodiments, the sense strand sequence comprises or consists of a sequence 100% identical to SEQ ID NOs: 10981-11000. The sense strand may comprise a modification pattern described herein. The sense strand may comprise a lipid moiety. The sense strand may comprise a GalNAc moiety.

[0156] In some embodiments, the siRNA comprises an antisense strand having a sequence in accordance with any of SEQ ID NOs: 11001-11020. In some embodiments, the antisense strand sequence comprises or consists of sequence at least 75% identical to any one of SEQ ID NOs: 11001-11020, at least 80% identical to any one of SEQ ID NOs: 11001-11020, at least 85% identical to of any one of SEQ ID NOs: 11001-11020, at least 90% identical to any one of SEQ ID NOs: 11001-11020, or at least 95% identical to any one of SEQ ID NOs: 11001-11020. In some embodiments, the antisense strand sequence comprises or consists of the sequence of any one of SEQ ID NOs: 11001-11020, or an antisense strand sequence thereof having 1, 2, 3, or 4 nucleoside substitutions, additions, or deletions. In some embodiments, the antisense strand sequence comprises or consists of the sequence of any one of SEQ ID NOs: 11001-11020, or an antisense strand sequence thereof having 1 or 2 nucleoside substitutions, additions, or deletions. In some embodiments, the antisense strand sequence comprises or consists of a sequence 100% identical to SEQ ID NOs: 11001-11020. The antisense strand may comprise a modification pattern described herein. The antisense strand may comprise a lipid moiety. The antisense strand may comprise a GalNAc moiety.

[0157] In some embodiments, the siRNA comprises a sense strand having a sequence in accordance with any of SEQ ID NOs: 11021-11090. In some embodiments, the sense strand sequence comprises or consists of sequence at least 75% identical to any one of SEQ ID NOs: 11021-11090, at least 80% identical to any one of SEQ ID NOs: 11021-11090, at least 85% identical to of any one of SEQ ID NOs: 11021-11090, at least 90% identical to any one of SEQ ID NOs: 1-5490, or at least 95% identical to any one of SEQ ID NOs: 11021-11090. In some embodiments, the sense strand sequence comprises or consists of the sequence of any one of SEQ ID NOs: 11021-11090, or a sense strand sequence thereof having 1, 2, 3, or 4 nucleoside substitutions, additions, or deletions. In some embodiments, the sense strand sequence comprises or consists of the sequence of any one of SEQ ID NOs: 11021-11090, or a sense strand sequence thereof having 1 or 2 nucleoside substitutions, additions, or deletions. In some embodiments, the sense strand sequence comprises or consists of a sequence 100% identical to SEQ ID NOs: 11021-11090. The sense strand may comprise a modification pattern described herein. The sense strand may comprise a lipid moiety. The sense strand may comprise a GalNAc moiety.

[0158] In some embodiments, the siRNA comprises a sense strand having a sequence in accordance with any of SEQ ID NOs: 11091-11115. In some embodiments, the sense strand sequence comprises or consists of sequence at least 75% identical to any one of SEQ ID NOs: 11091-11115, at least 80% identical to any one of SEQ ID NOs: 11091-11115, at least 85% identical to of any one of SEQ ID NOs: 11091-11115, at least 90% identical to any one of SEQ ID NOs: 1-5490, or at least 95% identical to any one of SEQ ID NOs: 11091-11115. In some embodiments, the sense strand sequence comprises or consists of the sequence of any one of SEQ ID NOs: 11091-11115, or a sense strand sequence thereof having 1, 2, 3, or 4 nucleoside substitutions, additions, or deletions. In some embodiments, the sense strand sequence comprises or consists of the sequence of any one of SEQ ID NOs: 11091-11115, or a sense strand sequence thereof having 1 or 2 nucleoside substitutions, additions, or deletions. In some embodiments, the sense strand sequence comprises or consists of a sequence 100% identical to SEQ ID NOs: 11091-11115. The sense strand may comprise a modification pattern described herein. The sense strand may comprise a lipid moiety such as a cholesterol moiety described herein.

[0159] In some embodiments, the siRNA comprises an antisense strand having a sequence in accordance with any of SEQ ID NOs: 11116-11140. In some embodiments, the antisense strand sequence comprises or consists of sequence at least 75% identical to any one of SEQ ID NOs: 11116-11140, at least 80% identical to any one of SEQ ID NOs: 11116-11140, at least 85% identical to of any one of SEQ ID NOs: 11116-11140, at least 90% identical to any one of SEQ ID NOs: 11116-11140, or at least 95% identical to any one of SEQ ID NOs: 11116-11140. In some embodiments, the antisense strand sequence comprises or consists of the sequence of any one of SEQ ID NOs: 11116-11140, or an antisense strand sequence thereof having 1, 2, 3, or 4 nucleoside substitutions, additions, or deletions. In some embodiments, the antisense strand sequence comprises or consists of the sequence of any one of SEQ ID NOs: 11116-11140, or an antisense strand sequence thereof having 1 or 2 nucleoside substitutions, additions, or deletions. In some embodiments, the antisense strand sequence comprises or consists of a sequence 100% identical to SEQ ID NOs: 11116-11140. The antisense strand may comprise a modification pattern described herein. The antisense strand may comprise a lipid moiety. The antisense strand may comprise a GalNAc moiety.

[0160] In some embodiments, the siRNA comprises a sense strand having a sequence in accordance with any of SEQ ID NOs: 11141-11252. In some embodiments, the sense strand sequence comprises or consists of sequence at least 75% identical to any one of SEQ ID NOs: 11141-11252, at least 80% identical to any one of SEQ ID NOs: 11141-11252, at least 85% identical to of any one of SEQ ID NOs: 11141-11252, at least 90% identical to any one of SEQ ID NOs: 1-5490, or at least 95% identical to any one of SEQ ID NOs: 11141-11252. In some embodiments, the sense strand sequence comprises or consists of the sequence of any one of SEQ ID NOs: 11141-11252, or a sense strand sequence thereof having 1, 2, 3, or 4 nucleoside substitutions, additions, or deletions. In some embodiments, the sense strand sequence comprises or consists of the sequence of any one of SEQ ID NOs: 11141-11252, or a sense strand sequence thereof having 1 or 2 nucleoside substitutions, additions, or deletions. In some embodiments, the sense strand sequence comprises or consists of a sequence 100% identical to SEQ ID NOs: 11141-11252. The sense strand may comprise a modification pattern described herein. The sense strand may comprise a lipid moiety. The sense strand may comprise a GalNAc moiety.

[0161] In some embodiments, the siRNA comprises an antisense strand having a sequence in accordance with any of SEQ ID NOs: 11119-11140. In some embodiments, the antisense strand sequence comprises or consists of sequence at least 75% identical to any one of SEQ ID NOs: 11119-11140, at least 80% identical to any one of SEQ ID NOs: 11119-11140, at least 85% identical to of any one of SEQ ID NOs: 11119-11140, at least 90% identical to any one of SEQ ID NOs: 11119-11140, or at least 95% identical to any one of SEQ ID NOs: 11119-11140. In some embodiments, the antisense strand sequence comprises or consists of the sequence of any one of SEQ ID NOs: 11119-11140, or an antisense strand sequence thereof having 1, 2, 3, or 4 nucleoside substitutions, additions, or deletions. In some embodiments, the antisense strand sequence comprises or consists of the sequence of any one of SEQ ID NOs: 11119-11140, or an antisense strand sequence thereof having 1 or 2 nucleoside substitutions, additions, or deletions. In some embodiments, the antisense strand sequence comprises or consists of a sequence 100% identical to SEQ ID NOs: 11119-11140. The antisense strand may comprise a modification pattern described herein. The antisense strand may comprise a lipid moiety. The antisense strand may comprise a GalNAc moiety.

### G. ASO Modification Patterns

[0162] In some embodiments, the composition comprises an oligonucleotide that inhibits the expression of SOS2, wherein the oligonucleotide comprises an antisense oligonucleotide (ASO). In some embodiments, the ASO comprises modification pattern ASO1: 5′-nsnsnsnsnsdNsdNsdNsdNsdNsdNsdNsdNsdNsdNsnsnsnsnsn-3′, wherein “dN” is any deoxynucleotide, “n” is a 2′O-methyl or 2′O-methoxyethyl-modified nucleoside, and “s” is a phosphorothioate linkage. In some embodiments, the ASO comprises modification pattern 1S, 2S, 3S, 4S, 5S, 6S, 7S, 8S, 9S, 10S, 11S, 12S, 13S, 14S, 15S, 16S, 17S, 18S, 19S, 20S, 21S, 22S, 23S, 24S, 25S, 26S, 27S, 28S, 29S, 30S, 31S, 32S, 33S, 34S, 35S, 36S, 37S, 39S, 40S, 41S, 42S, 43S, 44S, 45S, 46S, 47S, 48S, 49S, 50S, 51S, 52S, 53S, 54S, 55S, 56S, 57S, 58S, 1AS, 2AS, 3AS, 4AS, or 5AS.

### H. Formulations

[0163] In some embodiments, the composition is a pharmaceutical composition. In some embodiments, the composition is sterile. In some embodiments, the composition further comprises a pharmaceutically acceptable carrier.

[0164] In some embodiments, the pharmaceutically acceptable carrier comprises water. In some embodiments, the pharmaceutically acceptable carrier comprises a buffer. In some embodiments, the pharmaceutically acceptable carrier comprises a saline solution. In some embodiments, the pharmaceutically acceptable carrier comprises water, a buffer, or a saline solution. In some embodiments, the composition comprises a liposome. In some embodiments, the pharmaceutically acceptable carrier comprises liposomes, lipids, nanoparticles, proteins, protein-antibody complexes, peptides, cellulose, nanogel, or a combination thereof. In some embodiments, the composition is formulated for ocular delivery.

### II. METHODS AND USES

[0165] Disclosed herein, in some embodiments, are methods of administering a composition described herein to a subject. Some embodiments relate to use a composition described herein, such as administering the composition to a subject.

[0166] Some embodiments relate to a method of treating a disorder in a subject in need thereof. Some embodiments relate to use of a composition described herein in the method of treatment. Some embodiments include administering a composition described herein to a subject with the disorder. In some embodiments, the administration treats the disorder in the subject. In some embodiments, the composition treats the disorder in the subject.

[0167] In some embodiments, the treatment comprises prevention, inhibition, or reversion of the disorder in the subject. Some embodiments relate to use of a composition described herein in the method of preventing, inhibiting, or reversing the disorder. Some embodiments relate to a method of preventing, inhibiting, or reversing a disorder a disorder in a subject in need thereof. Some embodiments include administering a composition described herein to a subject with the disorder. In some embodiments, the administration prevents, inhibits, or reverses the disorder in the subject. In some embodiments, the composition prevents, inhibits, or reverses the disorder in the subject.

[0168] Some embodiments relate to a method of preventing a disorder a disorder in a subject in need thereof. Some embodiments relate to use of a composition described herein in the method of preventing the disorder. Some embodiments include administering a composition described herein to a subject with the disorder. In some embodiments, the administration prevents the disorder in the subject. In some embodiments, the composition prevents the disorder in the subject.

[0169] Some embodiments relate to a method of inhibiting a disorder a disorder in a subject in need thereof. Some embodiments relate to use of a composition described herein in the method of inhibiting the disorder. Some embodiments include administering a composition described herein to a subject with the disorder. In some embodiments, the administration inhibits the disorder in the subject. In some embodiments, the composition inhibits the disorder in the subject.

[0170] Some embodiments relate to a method of reversing a disorder a disorder in a subject in need thereof. Some embodiments relate to use of a composition described herein in the method of reversing the disorder. Some embodiments include administering a composition described herein to a subject with the disorder. In some embodiments, the administration reverses the disorder in the subject. In some embodiments, the composition reverses the disorder in the subject.

### A. Disorders

[0171] Some embodiments of the methods described herein include treating a disorder in a subject in need thereof. Some embodiments include administering a composition described herein to a subject having the disorder. In some embodiments, the disorder is a chronic kidney disease, diabetic nephropathy, gout, hyperuricemia, hypertension, cerebrovascular disease, type 2 diabetes, metabolic syndrome, obesity, hyperlipidemia, hypertriglyceridemia, glaucoma, ocular hypertension, retinal diseases, age-related macular degeneration, choroidal neovascularization, geographic atrophy, diabetic retinopathy, non-alcoholic fatty liver disease, fibrotic liver disease, liver fibrosis, cirrhosis, or hair loss disorder. In some embodiments, the disorder comprises a kidney disease. In some embodiments, the disorder comprises chronic kidney disease. In some embodiments, the disorder comprises diabetic nephropathy. In some embodiments, the disorder comprises gout. In some embodiments, the disorder comprises hyperuricemia. In some embodiments, the disorder comprises hypertension. In some embodiments, the disorder comprises cerebrovascular disease. In some embodiments, the disorder comprises a metabolic disorder. In some embodiments, the disorder comprises diabetes. In some embodiments, the disorder comprises type 2 diabetes. In some embodiments, the disorder comprises metabolic syndrome. In some embodiments, the disorder comprises obesity. In some embodiments, the disorder comprises hyperlipidemia. In some embodiments, the disorder comprises hypertriglyceridemia. In some embodiments, the disorder comprises glaucoma. In some embodiments, the disorder comprises ocular hypertension. In some embodiments, the disorder comprises retinal diseases. In some embodiments, the disorder comprises age-related macular degeneration. In some embodiments, the disorder comprises choroidal neovascularization. In some embodiments, the disorder comprises geographic atrophy. In some embodiments, the disorder comprises diabetic retinopathy. In some embodiments, the disorder comprises a liver disease. In some embodiments, the disorder comprises non-alcoholic fatty liver disease. In some embodiments, the disorder comprises fibrotic liver disease. In some embodiments, the disorder comprises liver fibrosis. In some embodiments, the disorder comprises cirrhosis. In some embodiments, the disorder comprises hair loss.

### B. Subjects

[0172] Some embodiments of the methods described herein include treatment of a subject. Non-limiting examples of subjects include vertebrates, animals, mammals, dogs, cats, cattle, rodents, mice, rats, primates, monkeys, and humans. In some embodiments, the subject is a vertebrate. In some embodiments, the subject is an animal. In some embodiments, the subject is a mammal. In some embodiments, the subject is a dog. In some embodiments, the subject is a cat. In some embodiments, the subject is a cattle. In some embodiments, the subject is a mouse. In some embodiments, the subject is a rat. In some embodiments, the subject is a primate. In some embodiments, the subject is a monkey. In some embodiments, the subject is an animal, a mammal, a dog, a cat, cattle, a rodent, a mouse, a rat, a primate, or a monkey. In some embodiments, the subject is a human. In some embodiments, the subject is male. In some embodiments, the subject is female.

[0173] In some embodiments, the subject has a body mass index (BMI) of 25, 26, 27, 28, 29, 30, 31, 32, 33, 34, 35, 36, 37, 38, 39, 40, 41, 42, 43, 44, 45, 46, 47, 48, 49, 50, or more, or a range defined by any two of the aforementioned integers. In some embodiments, the subject is overweight. In some embodiments, the subject has a BMI of 25 or more. In some embodiments, the subject has a BMI of 25-29. In some embodiments, the subject is obese. In some embodiments, the subject has a BMI of 30 or more. In some embodiments, the subject has a BMI of 30-39. In some embodiments, the subject has a BMI of 40-50. In some embodiments, the subject has a BMI of 25-50.

[0174] In some embodiments, the subject is ≥90 years of age. In some embodiments, the subject is ≥85 years of age. In some embodiments, the subject is ≥80 years of age. In some embodiments, the subject is ≥70 years of age. In some embodiments, the subject is ≥60 years of age. In some embodiments, the subject is ≥50 years of age. In some embodiments, the subject is ≥40 years of age. In some embodiments, the subject is ≥30 years of age. In some embodiments, the subject is ≥20 years of age. In some embodiments, the subject is ≥10 years of age. In some embodiments, the subject is ≥1 years of age. In some embodiments, the subject is ≥0 years of age.

[0175] In some embodiments, the subject is ≤100 years of age. In some embodiments, the subject is ≤90 years of age. In some embodiments, the subject is ≤85 years of age. In some embodiments, the subject is ≤80 years of age. In some embodiments, the subject is ≤70 years of age. In some embodiments, the subject is ≤60 years of age. In some embodiments, the subject is ≤50 years of age. In some embodiments, the subject is ≤40 years of age. In some embodiments, the subject is ≤30 years of age. In some embodiments, the subject is ≤20 years of age. In some embodiments, the subject is ≤10 years of age. In some embodiments, the subject is ≤1 years of age.

[0176] In some embodiments, the subject is between 0 and 100 years of age. In some embodiments, the subject is between 20 and 90 years of age. In some embodiments, the subject is between 30 and 80 years of age. In some embodiments, the subject is between 40 and 75 years of age. In some embodiments, the subject is between 50 and 70 years of age. In some embodiments, the subject is between 40 and 85 years of age.

### C. Baseline Measurements

[0177] Some embodiments of the methods described herein include obtaining a baseline measurement from a subject. For example, in some embodiments, a baseline measurement is obtained from the subject prior to treating the subject. Non-limiting examples of baseline measurements include a baseline glomerular filtration rate (GFR) or estimated glomerular filtration rate (eGFR) measurement, a baseline creatinine measurement, a baseline blood urea nitrogen (BUN) measurement, a baseline proteinuria measurement, a baseline microalbuminuria measurement, a baseline blood urate measurement, a baseline urine albumin creatine ratio, a baseline systolic blood pressure (SBP) measurement, a baseline diastolic blood pressure (DBP) measurement, a baseline mean arterial pressure measurement, a baseline pulse pressure measurement, a baseline intraocular pressure (IOP) measurement, a baseline cup-disc ratio, a baseline RNFL thickness measurement, a baseline optic nerve head cupping measurement, a baseline RPE pigmentation and reflectivity measurement, a baseline retinal thickness measurement, a baseline drusen measurement, a baseline macular hemorrhage measurement, a baseline choroidal neovascularization measurement, a baseline edema measurement, a baseline microaneurysm measurement, a baseline intraretinal hemorrhage measurement, a baseline macular ischemia measurement, a baseline neovascularization measurement, a baseline vitreous hemorrhage measurement, a baseline traction retinal detachment measurement, a baseline hemoglobin A1C measurement, a baseline body mass index (BMI), a baseline body weight measurement, a baseline waist circumference measurement, a baseline hip circumference measurement, a baseline waist-hip ratio (WHR), a baseline body fat percentage, a baseline blood glucose measurement, a baseline glucose tolerance measurement, a baseline insulin sensitivity measurement, a baseline blood triglyceride measurement, a baseline non-HDL cholesterol measurement, a baseline alanine aminotransferase (ALT) measurement, a baseline aspartate aminotransferase (AST) measurement, a baseline liver fat percentage (LFP) measurement, a baseline liver fibrosis measurement, a baseline liver fibrosis score, a baseline NAFLD activity score, a baseline blood gamma-glutamyl transferase (GGT) measurement, a baseline hair count measurement, a baseline hair thickness measurement, a baseline hair density measurement, a baseline SOS2 protein measurement, or a baseline SOS2 mRNA measurement.

[0178] In some embodiments, the baseline measurement is obtained directly from the subject. In some embodiments, the baseline measurement is obtained by observation, for example by observation of the subject or of the subject's tissue. In some embodiments, the baseline measurement is obtained noninvasively using an imaging device. In some embodiments, the baseline measurement is obtained in a sample from the subject. In some embodiments, the baseline measurement is obtained in one or more histological tissue sections. In some embodiments, the baseline measurement is obtained by performing an assay such as an immunoassay, a colorimetric assay, or a fluorescence assay, on the sample obtained from the subject. In some embodiments, the baseline measurement is obtained by an immunoassay, a colorimetric assay, a fluorescence assay, or a chromatography (e.g. HPLC) assay. In some embodiments, the baseline measurement is obtained by PCR.

[0179] In some embodiments, the baseline measurement is a baseline GFR or eGFR measurement. In some embodiments, the baseline measurement is a baseline GFR measurement. In some embodiments, the baseline measurement is a baseline eGFR measurement. The baseline GFR or eGFR measurement may be indicated in units of volume per time (e.g. mL/min). The baseline GFR measurement may be obtained using a baseline clearance measurement such as a baseline creatinine clearance measurement. The baseline GFR may also be determined by injecting insulin, sinistrin, a radioactive tracer, or cystatin C, and determining a baseline clearance rate. The baseline eGFR measurement may be also be obtained using a clearance estimate such as an estimation of serum creatinine clearance. The baseline GFR or eGFR may be 100-130 mL/min/1.73 m², 90-100 mL/min/1.73 m². The baseline GFR or eGFR may be below 90 or 100 mL/min/1.73 m². The baseline GFR or eGFR may be indicative of normal kidney function, CKD1, CKD2, CKD3, CKD4, or CKD5, as indicated by the following kidney function index:
[0180] Normal kidney function—GFR above 90 mL/min/1.73 m² (optionally with no proteinuria)
[0181] CKD1—GFR above 90 mL/min/1.73 m² (optionally with evidence of kidney damage)
[0182] CKD2 (mild)—GFR of 60 to 89 mL/min/1.73 m² (optionally with evidence of kidney damage)
[0183] CKD3 (moderate)—GFR of 30 to 59 mL/min/1.73 m²
[0184] CKD4 (severe)—GFR of 15 to 29 mL/min/1.73 m²
[0185] CKD5 kidney failure—GFR less than 15 mL/min/1.73 m²

[0186] In some embodiments, the baseline measurement is a baseline creatinine measurement. In some embodiments, the baseline creatinine measurement is a baseline creatinine concentration. In some embodiments, the baseline creatinine measurement is a baseline circulating (e.g. serum or plasma) creatinine measurement. In some embodiments, the baseline creatinine measurement is a baseline urine creatinine measurement. In some embodiments, the baseline creatinine measurement is obtained by an assay such as an immunoassay, a colorimetric assay, or a fluorescence assay. The baseline circulating creatinine measurement may be about 0.5-1.3 mg/dL. The baseline creatinine may be measured in a fluid sample. The baseline circulating creatinine measurement may be above 1.3 mg/dL. The baseline circulating creatinine measurement may be within, above, or below a reference range. The baseline urine creatinine measurement may be within, above, or below a reference range. Typical human reference ranges for serum creatinine are 0.5 mg/dL to 1.0 mg/dL for women or 0.7 mg/dL to 1.2 mg/dL for men. The significance of a single creatinine value may be interpreted in light of the patient's muscle mass. A patient with a greater muscle mass may have a higher creatinine concentration. While a baseline serum creatinine of 2.0 mg/dL (177 mol/L) may indicate normal kidney function in a male body builder, a serum creatinine of 1.6 mg/dL (110 mol/L) may indicate significant renal disease in an elderly female. Males may typically produce approximately 150 mol to 200 mol of creatinine per kilogram of body weight per 24 h while females may produce approximately 100 mol/kg/24 h to 150 mol/kg/24 h. In normal circumstances, all this daily creatinine production is excreted in the urine, which may be included in a baseline urine creatinine measurement.

[0187] In some embodiments, the baseline measurement is a baseline blood urea nitrogen (BUN) measurement. In some embodiments, the baseline BUN measurement is a baseline BUN concentration. In some embodiments, the baseline BUN measurement is a baseline circulating BUN measurement. In some embodiments, the baseline BUN measurement is obtained by an assay such as an immunoassay, a colorimetric assay, or a fluorescence assay. In some embodiments, the baseline BUN is 6-20 mg/dL. In some embodiments, the baseline BUN is over 20 mg/dL. A normal BUN range is 6-20 mg/dL. In some embodiments, the baseline measurement is a baseline BUN/creatinine ratio.

[0188] In some embodiments, the baseline measurement is a baseline proteinuria measurement. “Proteinuria” may describe an increase (e.g. a moderate increase) in a level of urine protein. The baseline proteinuria measurement may be indicated as a concentration, a ratio, or a mass/unit time (e.g. mg/mmol urine, protein/creatinine, or mg protein/hr). In some embodiments, the baseline proteinuria measurement includes a baseline proteinuria concentration. In some embodiments, the baseline proteinuria measurement is a baseline urine protein measurement. In some embodiments, the baseline proteinuria measurement is obtained by an assay such as an immunoassay, a colorimetric assay, or a fluorescence assay. In some embodiments, the baseline proteinuria measurement is indicative of proteinuria in the subject. Proteinuria can be diagnosed from a 24-hour urine collection or, from an elevated concentration in a spot sample. In some embodiments, the baseline measurement is a baseline urine protein/creatinine ratio.

[0189] In some embodiments, the baseline measurement is a baseline microalbuminuria measurement. “Microalbuminuria” may describe an increase (e.g. a moderate increase) in a level of urine albumin. The baseline microalbuminuria measurement may be indicated as a concentration, a ratio, or a mass/unit time (e.g. mg/mmol urine, albumin/creatinine, or mg albumin/hr). In some embodiments, the baseline microalbuminuria measurement includes a baseline microalbuminuria concentration. In some embodiments, the baseline microalbuminuria measurement is a baseline urine microalbuminuria measurement. In some embodiments, the baseline microalbuminuria measurement is obtained by an assay such as an immunoassay, a colorimetric assay, or a fluorescence assay. In some embodiments, the baseline microalbuminuria measurement is indicative of microalbuminuria in the subject. Microalbuminuria can be diagnosed from a 24-hour urine collection (between 30-300 mg/24 hours) or, from an elevated concentration in a spot sample (20 to 200 mg/l). In some embodiments, the baseline measurement is a baseline urine albumin/creatinine ratio. The baseline microalbuminuria measurement may include a microalbuminuria measurement within a range or amount defined in Table 2.

TABLE 2
Microalbuminuria reference values

| | | Lower | Upper | |
|---|---|---|---|---|
| | Individual | limit | limit | Unit |
| 24 h urine | | 30 | 300 | mg/24 h (milligram |
| collection | | | | albumin per 24 hours) |
| Short-time | | 20 | 200 | μg/min (microgram |
| urine collection | | | | albumin per minute) |
| Spot urine | | 30 | 300 | mg/L (milligram albumin |
| albumin sample | | | | per liter of urine) |
| Spot urine | Women | 3.5 | 25 or | mg/mmol (milligram |
| albumin/ | | | 35 | albumin per millimole |
| creatinine ratio | | | | creatinine) |
| | | 30 | 400 | μg/mg (microgram |
| | | | | albumin per milligram |
| | | | | creatinine) |
| | Men | 2.5 or | 25 or | mg/mmol |
| | | 3.5 | 35 | |
| | | 30 | 300 | μg/mg |

[0190] In some embodiments, the baseline measurement is a baseline blood urate measurement. In some embodiments, the baseline blood urate measurement is a baseline blood urate concentration. In some embodiments, the baseline blood urate measurement is obtained by an assay such as an immunoassay, a colorimetric assay, or a fluorescence assay. In some embodiments, the baseline blood urate measurement is indicative of hyperuricemia. Serum uric acid concentrations greater than 6 mg/dL (e.g. for females), greater than 7 mg/dL (e.g. for men), or greater than 5.5 mg/dL (e.g. for a subject under 18 years old) may be indicative of hyperuricemia.

[0191] Some embodiments of the methods described herein include obtaining the baseline measurement of the subject by measuring blood pressure (e.g. systolic or diastolic) with a sphygmomanometer in which a healthcare professional places a cuff around an arm of the subject and inflates the cuff with a pump until the circulation is cut off A small valve slowly deflates the cuff, and the healthcare professional measures the pressure with the aid of a stethoscope that is placed over the arm of the subject in order to listen for the sound of the blood pulsing through the arteries. The first measurement in which blood rushes is the systolic blood pressure (SBP), and after the sound fades, the second number indicates the diastolic blood pressure (DBP), which is a measure the blood pressure of the heart at rest. The mean arterial pressure (MAP) is an average blood pressure of the subject during a single cardiac cycle. The MAP can be measured directly using methods such as applanation tonometry or it can be approximated by using a formula in which the diastolic blood pressure is doubled and added to the systolic blood pressure and that composite sum is then divided by 3 to estimate MAP. The pulse pressure can be calculated by subtracting the systolic pressure from the diastolic pressure.

[0192] In some embodiments, the baseline measurement is a baseline systolic blood (SBP) pressure measurement. In some embodiments, the baseline SBP measurement is measured in mm of mercury (mm Hg). In some embodiments, the SBP measurement is obtained with a sphygmomanometer. The baseline SBP measurement may be indicative of normal blood pressure. For most adults, normal SBP at rest is within the range of 100-130 mmHg. For most adults, hypertension is present if the resting blood pressure is persistently at or above 130/80 or 140/90 mmHg. The baseline SBP measurement may be indicative of hypertension (e.g. at least 130 mmHg, or at least 140 mmHg). The baseline SBP measurement may include a baseline cerebral SBP measurement.

[0193] In some embodiments, the baseline measurement is a baseline diastolic blood (DBP) pressure measurement. In some embodiments, the baseline DBP measurement is measured in mm Hg. In some embodiments, the DBP measurement is obtained with a sphygmomanometer. The baseline DBP measurement may be indicative of normal blood pressure. For most adults, normal DBP at rest is within the range of 60-80 mmHg. The baseline DBP measurement may be indicative of hypertension (e.g. at least 80 mmHg, or at least 90 mmHg). The baseline DBP measurement may include a baseline cerebral DBP measurement.

[0194] In some embodiments, the baseline measurement is a baseline mean arterial pressure (MAP). In some embodiments, the baseline MAP is measured in mm of mercury (mm Hg). In some embodiments, the MAP measurement is obtained with a sphygmomanometer. The baseline MAP may be indicative of normal blood pressure. For most adults, MAP at rest is in a range of 70-100 mmHg. The baseline MAP measurement may be indicative of hypertension (e.g. greater than 100 mmHg).

[0195] In some embodiments, the baseline measurement is a baseline pulse pressure. In some embodiments, the baseline pulse pressure is measured in mm of mercury (mm Hg). In some embodiments, the pulse pressure measurement is obtained with a sphygmomanometer. The baseline pulse pressure may be indicative of normal blood pressure. For most adults, normal pulse pressure at rest is less than 40 mm Hg. The baseline pulse pressure may be indicative of hypertension (e.g. at least 50 mm Hg or at least 60 mm Hg).

[0196] In some embodiments, the baseline measurement is a baseline intraocular pressure (IOP) measurement. The baseline IOP may be measured using a tonometer. The baseline IOP measurement may be in millimeters of mercury (mmHg). The baseline IOP measurement may be indicative of a normal IOP. The baseline IOP measurement may be indicative of abnormal or high IOP. A normal IPO measurement may be between 10 mmHg and 20 mmHg. The baseline IOP measurement may be above 20 mmHg.

[0197] In some embodiments, the baseline measurement is a baseline measurement of optic nerve head cupping. The baseline measurement of optic nerve head cupping may be a cup-disc ratio measurement. The baseline cup-disc ratio may be measured using a slit lamp. The baseline cup-disc ratio measurement may be indicative of a normal cup-disc ratio. The baseline cup-disc ratio measurement may be indicative of a high or abnormal cup-disc ratio. A normal cup-disc ratio measurement may be between 0.4 and 0.8. The baseline cup-disc ratio measurement may be above 0.8.

[0198] In some embodiments, the baseline measurement is a baseline retinal nerve fiber layer (RNFL) thickness measurement. The baseline RNFL thickness may be measured using optical coherence tomography. The baseline RNFL thickness measurement may be in μm. The baseline RNFL thickness measurement may be indicative of a normal RNFL thickness measurement. The baseline RNFL thickness measurement may be indicative of a low or abnormal RNFL thickness measurement. A normal RNFL thickness measurement may be around 100 μm. The baseline RNFL thickness measurement may be below 90 μm.

[0199] In some embodiments, the baseline measurement is a baseline retinal thickness measurement. The baseline retinal thickness may be measured using optical coherence tomography. The baseline retinal thickness measurement may be in μm. The baseline retinal thickness measurement may be indicative of a normal retinal thickness measurement. The baseline retinal thickness measurement may be indicative of a high or abnormal retinal thickness measurement. A normal retinal thickness measurement may be about 190 μm to 250 m. The baseline retinal thickness measurement may be above 250 μm.

[0200] In some embodiments, the baseline measurement is a baseline edema measurement. The baseline edema may be measured using optical coherence tomography. The baseline edema measurement may be in μm. The baseline edema measurement may be indicative of a normal edema measurement. The baseline edema measurement may be indicative of a high or abnormal edema measurement. A normal edema measurement may be between 190 μm and 250 μm. The baseline edema measurement may be above 250 μm.

[0201] In some embodiments, the baseline measurement is a baseline RPE pigmentation and reflectivity measurement. The baseline RPE pigmentation and reflectivity measurement may be measured using optical coherence tomography. The baseline RPE pigmentation and reflectivity measurement may be indicative of a normal RPE pigmentation and reflectivity measurement. The baseline RPE pigmentation and reflectivity measurement may be indicative of abnormal RPE pigmentation and reflectivity.

[0202] In some embodiments, the baseline measurement is a baseline drusen measurement. The baseline drusen may be measured using an eye exam or retinal photography. The baseline drusen measurement may be the size of the drusen or the number of the drusen. The baseline drusen measurement may be indicative of a normal drusen measurement. The baseline drusen measurement may be indicative of a high or abnormal drusen measurement.

[0203] In some embodiments, the baseline measurement is a baseline hemorrhage measurement. The baseline hemorrhage measurement may be a vitreous hemorrhage. The baseline hemorrhage measurement may be an intraretinal hemorrhage. The baseline hemorrhage may be a macular hemorrhage. The baseline hemorrhage may be measured using retinal photography. The baseline hemorrhage measurement may be indicative of a normal hemorrhage measurement. The baseline hemorrhage measurement may be indicative of an abnormal or high hemorrhage measurement.

[0204] In some embodiments, the baseline measurement is a baseline macular ischemia measurement. The baseline macular ischemia may be measured using fluorescein angiography or optical coherence tomography angiography. The baseline macular ischemia measurement may be a measurement of the foveal avascular zone. The baseline macular ischemia measurement may be indicative of a normal macular ischemia measurement. The baseline macular ischemia measurement may be indicative of a high or abnormal macular ischemia measurement. A normal foveal avascular zone measurement may have a diameter between 0.5 mm to 0.6 mm. The baseline foveal avascular zone measurement may have a diameter above 0.6 mm.

[0205] In some embodiments, the baseline measurement is a baseline microaneurysm measurement. The baseline microaneurysm may be measured using fluorescein angiography. The baseline microaneurysm measurement may be the count of microaneurysms. The baseline microaneurysm measurement may be indicative of a normal microaneurysm measurement. The baseline microaneurysm measurement may be indicative of high or abnormal microaneurysm measurement.

[0206] In some embodiments, the baseline measurement is a baseline neovascularization measurement. The baseline neovascularization measurement may be a choroidal neovascularization measurement. The baseline neovascularization measurement may be measured using imaging techniques such as fluorescein angiography. The baseline neovascularization measurement may be an area of the neovascularization. The baseline neovascularization measurement may be indicative of a normal neovascularization measurement. The baseline neovascularization measurement may be indicative of a high or abnormal neovascularization measurement.

[0207] In some embodiments, the baseline measurement is a baseline traction retinal detachment measurement. The baseline traction retinal detachment may be measured using imaging techniques, including optical coherence tomography. The baseline traction retinal detachment measurement may be indicative of a normal retina. The baseline traction retinal detachment measurement may be indicative of macular degeneration or diabetic retinopathy.

[0208] In some embodiments, the baseline measurement is a baseline hemoglobin A1C measurement. In some embodiments, the baseline hemoglobin A1C measurement is a baseline hemoglobin A1C concentration. In some embodiments, the baseline hemoglobin A1C measurement is a baseline circulating hemoglobin A1C measurement. In some embodiments, the baseline hemoglobin A1C measurement is obtained by an assay such as an immunoassay, a colorimetric assay, a fluorescence assay, or HPLC. The baseline hemoglobin A1C measurement may be indicative of a healthy normal A1C measurement. The healthy normal hemoglobin A1C measurement may be below 48 mmol/mol (6.5 DCCT %). The healthy normal hemoglobin A1C measurement may be below 53 mmol/mol (7.0 DCCT %). The baseline hemoglobin A1C measurement may be indicative of diabetes of pre-diabetes. A baseline hemoglobin A1C measurement above 48 mmol/mol, or above 53 mmol/mol may indicate diabetes of pre-diabetes. The baseline hemoglobin A1C measurement may be indicative of diabetes. The baseline hemoglobin A1C measurement may be indicative of pre-diabetes. In some cases, the baseline hemoglobin A1C measurement is below 5.7 DCCT % (e.g. indicative of a normal healthy diagnosis). In some cases, the baseline hemoglobin A1C measurement is between 5.7 and 6.4 DCCT % (e.g. indicative of prediabetes). In some cases, the baseline hemoglobin A1C measurement is above 6.4 DCCT % (e.g. indicative of diabetes).

[0209] In some embodiments, the baseline measurement is a baseline body mass measurement. In some embodiments, the baseline body mass measurement is a baseline body mass index (BMI). BMI may be defined as a body mass divided by the square of body height, and may be expressed in units of kg/m². Body mass (body weight) may be obtained using a scale. Body height may be measured using a ruler or a measuring tape. Body height may include the height of a standing subject. Body height may include a distance from the bottom of a subject's feet to the top of the subject's head. BMI may include BMI prime. The subject may have a baseline BMI in a range exemplified in Table 3.

TABLE 3
BMI Examples

| | BMI | | BMI | |
|---|---|---|---|---|
| | (kg/m²) | | Prime | |
| Category | from | to | from | to |
| Very severely underweight | | 15 | | 0.6 |
| Severely underweight | 15 | 16 | 0.6 | 0.64 |
| Underweight | 16 | 18.5 | 0.64 | 0.74 |
| Normal (healthy weight) | 18.5 | 25 | 0.74 | 1 |
| Overweight | 25 | 30 | 1 | 1.2 |
| Obese Class I (Moderately obese) | 30 | 35 | 1.2 | 1.4 |
| Obese Class II (Severely obese) | 35 | 40 | 1.4 | 1.6 |
| Obese Class III (Very severely obese) | 40 | | 1.6 | |

[0210] In some embodiments, the baseline measurement is a baseline waist circumference measurement. A baseline waist circumference measurement may be obtained using a measuring tape.

[0211] In some embodiments, the baseline measurement is a baseline hip circumference measurement. A baseline hip circumference measurement may be obtained using a measuring tape.

[0212] In some embodiments, the baseline measurement is a baseline waist-hip ratio. A baseline waist-hip ratio may be obtained using a measuring tape.

[0213] In some embodiments, the baseline measurement is a baseline body fat percentage. A baseline body fat percentage may be obtained using underwater weighing, whole-body air displacement plethysmography, near-infrared interactance, dual energy X-ray absorptiometry, bioelectrical impedance, or a skinfold test.

[0214] In some embodiments, the baseline measurement is a baseline glucose measurement. In some embodiments, the baseline glucose measurement is a baseline glucose concentration (for example, mg/dL). In some embodiments, the baseline glucose measurement comprises a baseline glucose concentration. In some embodiments, the baseline glucose measurement is a baseline circulating glucose measurement. In some embodiments, the baseline glucose measurement is obtained by an assay such as an immunoassay, a colorimetric assay, or a fluorescence assay. In some embodiments, the baseline glucose measurement is obtained

[0215] In some embodiments, the baseline glucose measurement comprises a baseline glucose tolerance test. In some embodiments, the baseline glucose tolerance test comprises administering glucose to the subject, and then obtaining multiple baseline glucose measurements over time after administering the glucose to the subject. In some embodiments, the glucose is administered orally. In some embodiments, the glucose is administered by injection. In some embodiments, the multiple baseline glucose measurements are integrated into a baseline glucose area under the curve (AUC) measurement. In some embodiments, the baseline glucose tolerance test is performed on the subject in a fasted state such as after an overnight fast. In some embodiments, the baseline glucose measurement comprises a baseline glucose measurement other than a baseline glucose tolerance test.

[0216] In some embodiments, the baseline measurement is a baseline insulin measurement. In some embodiments, the baseline insulin measurement is a baseline insulin sensitivity measurement. In some embodiments, the baseline insulin sensitivity measurement is obtained using a glucose clamp technique such as a hyperinsulinemic euglycemic clamp. In some embodiments, the baseline insulin measurement is a baseline insulin concentration. In some embodiments, the baseline insulin measurement comprises a baseline insulin concentration. In some embodiments, the baseline insulin measurement is a baseline circulating insulin measurement. In some embodiments, the baseline insulin measurement is obtained by an assay such as an immunoassay (for example, an ELISA or an immunoblot), a colorimetric assay, or a fluorescence assay. In some embodiments, the baseline insulin sensitivity measurement comprises a baseline glucose tolerance test. In some embodiments, the baseline insulin sensitivity measurement comprises a baseline insulin sensitivity measurement other than a baseline glucose tolerance test.

[0217] In some embodiments, the baseline insulin measurement comprises a baseline insulin response test. In some embodiments, the baseline insulin response test comprises administering glucose to the subject and then obtaining multiple baseline insulin measurements over time after administering the glucose to the subject. In some embodiments, the glucose is administered orally. In some embodiments, the glucose is administered by injection. In some embodiments, the multiple baseline insulin measurements are integrated into a baseline insulin AUC measurement. In some embodiments, the baseline insulin response test is performed on the subject in a fasted state such as after an overnight fast.

[0218] In some embodiments, the baseline insulin measurement comprises a baseline glucose response test. In some embodiments, the baseline glucose response test comprises administering insulin to the subject, and then obtaining multiple baseline glucose measurements over time after administering the insulin to the subject. In some embodiments, the insulin is administered by injection. In some embodiments, the multiple baseline glucose measurements are integrated into a baseline glucose AUC measurement. In some embodiments, the multiple baseline glucose measurements are obtained with a glucometer. In some embodiments, the glucose response test is performed on the subject in a fasted state such as after an overnight fast. In some embodiments, the glucose response test is performed on the subject after administering food, drink, or glucose to the subject.

[0219] In some embodiments, the baseline measurement is a baseline triglyceride measurement. In some embodiments, the baseline triglyceride measurement is a baseline triglyceride concentration (for example, mg/dL). In some embodiments, the baseline triglyceride measurement is a baseline circulating triglyceride measurement. In some embodiments, the baseline triglyceride measurement a baseline circulating triglyceride measurement above 150 mg/dL. In some embodiments, the baseline triglyceride measurement is obtained by an assay such as an immunoassay, a colorimetric assay, or a fluorescence assay.

[0220] In some embodiments, the baseline measurement is a baseline cholesterol measurement. In some embodiments, the baseline cholesterol concentration is a baseline total cholesterol measurement. In some embodiments, the baseline cholesterol concentration is a baseline non-high density lipoprotein (HDL) cholesterol measurement. In some embodiments, the baseline cholesterol concentration is a baseline low density lipoprotein (LDL) cholesterol measurement. In some embodiments, the baseline cholesterol measurement is a baseline cholesterol concentration. In some embodiments, the baseline cholesterol measurement is a baseline circulating cholesterol measurement. In some embodiments, the baseline cholesterol measurement is a baseline blood cholesterol measurement. In some embodiments, the baseline cholesterol measurement is obtained by an assay such as an immunoassay, a colorimetric assay, or a fluorescence assay.

[0221] In some embodiments, the baseline measurement is a baseline liver enzyme measurement. In some embodiments, the baseline liver enzyme measurement is a baseline alanine aminotransferase (ALT) measurement. In some embodiments, the baseline liver enzyme measurement is a baseline aspartate aminotransferase (AST) measurement. In some embodiments, the baseline liver enzyme measurement comprises an ALT/AST ratio, or comprises an AST/ALT ratio. In some embodiments, the baseline liver enzyme measurement is obtained by an assay such as an immunoassay, a colorimetric assay, a fluorescence assay, or HPLC.

[0222] In some embodiments, the baseline measurement is a baseline alanine aminotransferase (ALT) measurement. In some embodiments, the baseline ALT measurement is a baseline ALT concentration (for example, Units/dL). In some embodiments, the baseline ALT measurement is a baseline circulating ALT measurement, for example, a baseline blood, serum, or plasma ALT measurement. In some embodiments, the baseline ALT measurement is obtained by an assay such as an immunoassay, a colorimetric assay, or a fluorescence assay. In some embodiments, the baseline ALT measurement is within a reference range of 34 IU/L or lower (e.g. for a female subject) or within a reference range of 45 IU/L or lower (e.g. for a male subject). In some embodiments, the baseline ALT measurement is above the reference range.

[0223] In some embodiments, the baseline measurement is a baseline aspartate aminotransferase (AST) measurement. In some embodiments, the baseline AST measurement is a baseline AST concentration (for example, Units/L). In some embodiments, the baseline AST measurement is a baseline circulating AST measurement, for example, a baseline blood, serum, or plasma AST measurement. In some embodiments, the baseline AST measurement is obtained by an assay such as an immunoassay, a colorimetric assay, or a fluorescence assay. In some embodiments, the baseline AST measurement is within a reference range of 6-34 IU/L (e.g. for a female subject) or within a reference range of 8-40 IU/L (e.g. for a male subject). In some embodiments, the baseline AST measurement is above the reference range. In some embodiments, the baseline AST measurement is below the reference range.

[0224] In some embodiments, the baseline measurement is a baseline liver steatosis measurement. In some embodiments, the baseline liver steatosis measurement is a baseline liver fat percentage (LFP) measurement. In some embodiments, the baseline measurement is a baseline LFP measurement. In some embodiments, the baseline LFP measurement is indicated as a mass/mass percentage of fat/total tissue. In some embodiments, the baseline LFP measurement is indicated as a mass/volume percentage of fat/total tissue. In some embodiments, the baseline LFP measurement is indicated as a volume/mass percentage of fat/total tissue. In some embodiments, the baseline LFP measurement is indicated as a volume/volume percentage of fat/total tissue. In some embodiments, the baseline LFP measurement is indicated as a score. In some embodiments, the baseline LFP measurement is obtained noninvasively. In some embodiments, the baseline LFP measurement is obtained by a medical imaging device. In some embodiments, the baseline LFP measurement is obtained by a device such as a medical resonance imaging (MRI) device, a magnetic resonance spectroscopy device, a computed tomography device, a controlled attenuation parameter (CAP), a transient elastography device, or an ultrasound device. In some embodiments, the baseline LFP measurement is obtained in a liver sample. In some embodiments, the baseline LFP measurement comprises a baseline liver triglyceride measurement. In some embodiments, the baseline LFP measurement is obtained by an assay such as an immunoassay, a colorimetric assay, or a fluorescence assay. In some embodiments, the baseline LFP measurement or the baseline LFP measurement is obtained using a scoring system upon a visual inspection of a sample such as a histological sample. In some embodiments, the baseline LFP measurement or the baseline LFP measurement is obtained using a stain with an affinity to fats, such as a lysochrome diazo dye.

[0225] In some embodiments, the baseline measurement is a baseline liver fibrosis measurement. In some embodiments, the baseline liver fibrosis measurement is a baseline liver fibrosis score (LFS). In some embodiments, the LFS comprises a score of 0, 1, 2, 3, or 4, or a range of scores defined by any two of the aforementioned numbers. In some embodiments, the LFS comprises a score of 0-4. In some embodiments, the LFS is obtained using a scoring system exemplified in Table 4. In some embodiments, the baseline LFS measurement is obtained noninvasively. In some embodiments, the baseline LFS measurement is obtained by a medical imaging device such as a vibration-controlled transient elastography (VCTE) device, a shear wave elastography device, a medical resonance imaging (MRI) device, a magnetic resonance spectroscopy device, a computed tomography device, or an ultrasound device. In some embodiments, the baseline LFS measurement is obtained in a liver sample. In some embodiments, the baseline LFS is obtained by an assay such as an immunoassay, a colorimetric assay, or a fluorescence assay. In some embodiments, the LFS is obtained using one or more indirect markers or measures of liver fibrosis such as an aspartate aminotransferase-to-platelet ratio index (APRI), a Fibrosis-4 (FIB-4) index, a FibroIndex, a Forns Index, a Hepascore, or a FibroTest. In some embodiments, the LFS is obtained using one or more indirect markers or measures of liver fibrosis such as a FIBROSpect test or a FIBROSpect II test. In some embodiments, the baseline LFS is obtained by RT-qPCR or RNA sequencing of one or more fibrosis-related genes such as a collagen gene. In some embodiments, the baseline LFS or the baseline LFS is obtained using a scoring system upon a visual inspection of a sample such as a histological sample. In some embodiments, the baseline LFS or the baseline LFS is obtained using a stain with an affinity to collagen.

TABLE 4
Non-Limiting Examples of Liver Fibrosis Scoring Systems

| Score | IASL | Batts-Ludwig | Metavir |
|---|---|---|---|
| 0 | No fibrosis | No fibrosis | No fibrosis |
| 1 | Mild fibrosis | Fibrous portal | Periportal fibrotic |
| | | expansion | expansion |
| 2 | Moderate | Rare bridges | Periportal septae |
| | fibrosis | or septae | (>1 septum) |
| 3 | Severe | Numerous | Portal-central |
| | fibrosis | bridges or septae | septae |
| 4 | Cirrhosis | Cirrhosis | Cirrhosis |

[0226] In some embodiments, the baseline liver fibrosis measurement is a baseline nonalcoholic fatty liver disease (NAFLD) fibrosis score. A baseline NAFLD fibrosis score may take into account laboratory test values such as platelet count, albumin, and AST/ALT ratio, and patient characteristics such as BMI, and diabetes status. A baseline NAFLD fibrosis score below −1.455 may be indicative of no fibrosis, mild fibrosis, or moderate fibrosis. A baseline NAFLD fibrosis score between −1.455 and 0.675 may be indicative of severe fibrosis. A baseline NAFLD fibrosis score above 0.675 may be indicative of cirrhosis.

[0227] In some embodiments, the baseline measurement is a baseline non-alcoholic fatty liver disease (NAFLD) activity score. In some embodiments, the baseline NAFLD activity score comprises a numerical value such as a number of points. In some embodiments, the numerical value is 0, 1, 2, 3, 4, 5, 6, 7, or 8, or a range defined by any two of the aforementioned numerical values. In some embodiments, the numerical value is 0-8. In some embodiments, the baseline NAFLD activity score comprises a steatosis grade such as a baseline liver fat percentage. In some embodiments, a steatosis grade <5% comprises 0 points in the baseline NAFLD activity score. In some embodiments, a steatosis grade of 5-33% comprises 1 point in the baseline NAFLD activity score. In some embodiments, a steatosis grade of 34-66% comprises 2 points in the baseline NAFLD activity score. In some embodiments, a steatosis grade of >66% comprises 3 points in the baseline NAFLD activity score. In some embodiments, the baseline NAFLD activity score comprises a lobular inflammation grade. In some embodiments, the lobular inflammation grade comprises an assessment of inflammatory foci. In some embodiments, a lobular inflammation grade comprising 0 foci comprises 0 points in the baseline NAFLD activity score. In some embodiments, a lobular inflammation grade comprising 1 focus per a field (such as a 20× field or a 200× field) comprises 1 point in the baseline NAFLD activity score. In some embodiments, a lobular inflammation grade comprising 2-4 foci per field comprises 2 points in the baseline NAFLD activity score. In some embodiments, a lobular inflammation grade comprising >4 foci per field comprises 3 points in the baseline NAFLD activity score. In some embodiments, the baseline NAFLD activity score comprises a liver cell injury grade such as an amount of ballooning cells. In some embodiments, a liver cell injury comprising no ballooning cells comprises 0 points in the baseline NAFLD activity score. In some embodiments, a liver cell injury comprising some new balloon cells comprises 1 points in the baseline NAFLD activity score. In some embodiments, a liver cell injury comprising many ballooning cells or prominent ballooning comprises 2 points in the baseline NAFLD activity score. In some embodiments, the baseline NAFLD activity score is obtained invasively, based on histology, and/or in a liver biopsy.

[0228] In some embodiments, the baseline measurement is a baseline gamma-glutamyl transferase (GGT) measurement. In some embodiments, the baseline GGT measurement is a baseline GGT concentration. In some embodiments, the baseline GGT measurement is a baseline blood GGT measurement. In some embodiments, the baseline GGT measurement is obtained by an assay such as an immunoassay, a colorimetric assay, a chromatography assay, or a fluorescence assay.

[0229] In some embodiments, the baseline measurement is a baseline hair count. In some embodiments, the baseline hair count is a baseline total hair count. The baseline total hair count may include a baseline vellus hair count and a baseline non-vellus hair count. In some embodiments, the baseline hair count is a baseline vellus hair count. In some embodiments, the baseline hair count is a baseline non-vellus hair count. In some embodiments, the baseline hair count is determined in an area of skin. In some embodiments, the baseline hair count is normalized based on the area of skin. In some embodiments, the baseline hair count is assessed using photography. In some embodiments, the baseline hair count is assessed by phototrichogram. In some embodiments, the baseline hair count is assessed by a macrophotography analysis.

[0230] In some embodiments, the baseline measurement is a baseline hair thickness measurement. In some embodiments, the baseline hair thickness measurement is determined in an area of skin. In some embodiments, the baseline hair thickness measurement comprises a width of an individual hair. In some embodiments, the baseline hair thickness measurement comprises widths of multiple individual hairs. In some embodiments, the baseline hair thickness measurement comprises an average of the widths of the multiple individual hairs. In some embodiments, the baseline hair thickness measurement comprises a median of the widths of the multiple individual hairs. The baseline hair thickness measurement may include a baseline vellus hair thickness measurement. The baseline hair thickness measurement may include a baseline non-vellus hair thickness measurement. In some embodiments, the baseline hair thickness measurement is assessed using photography. In some embodiments, the baseline hair thickness measurement is assessed by phototrichogram. In some embodiments, the baseline hair thickness measurement is assessed by a macrophotography analysis.

[0231] In some embodiments, the baseline measurement is a baseline hair density measurement. In some embodiments, the baseline hair density measurement is determined in an area of skin. In some embodiments, the baseline hair density measurement comprises a number of hair in the area of skin. In some embodiments, the baseline hair density measurement comprises the number of hair in the area of skin divided by the area of skin. The baseline hair density measurement may include a baseline vellus hair density measurement. The baseline hair density measurement may include a baseline non-vellus hair density measurement. In some embodiments, the baseline hair density measurement is assessed using photography. In some embodiments, the baseline hair density measurement is assessed by phototrichogram. In some embodiments, the baseline hair density measurement is assessed by a macrophotography analysis.

[0232] In some embodiments, the baseline measurement is a baseline SOS2 protein measurement. In some embodiments, the baseline SOS2 protein measurement comprises a baseline SOS2 protein level. In some embodiments, the baseline SOS2 protein level is indicated as a mass or percentage of SOS2 protein per sample weight. In some embodiments, the baseline SOS2 protein level is indicated as a mass or percentage of SOS2 protein per sample volume. In some embodiments, the baseline SOS2 protein level is indicated as a mass or percentage of SOS2 protein per total protein within the sample. In some embodiments, the baseline SOS2 protein measurement is a baseline tissue SOS2 protein measurement. Examples of baseline tissue SOS2 protein measurements include a baseline liver SOS2 protein measurement, a baseline kidney SOS2 protein measurement, a baseline eye SOS2 protein measurement, or a baseline adipose tissue SOS2 protein measurement. In some embodiments, the baseline SOS2 protein measurement is a baseline circulating SOS2 protein measurement. In some embodiments, the baseline SOS2 protein measurement is obtained by an assay such as an immunoassay, a colorimetric assay, or a fluorescence assay.

[0233] In some embodiments, the baseline measurement is a baseline SOS2 mRNA measurement. In some embodiments, the baseline SOS2 mRNA measurement comprises a baseline SOS2 mRNA level. In some embodiments, the baseline SOS2 mRNA level is indicated as a mass or percentage of SOS2 mRNA per sample weight. In some embodiments, the baseline SOS2 mRNA level is indicated as a mass or percentage of SOS2 mRNA per sample volume. In some embodiments, the baseline SOS2 mRNA level is indicated as a mass or percentage of SOS2 mRNA per total mRNA within the sample. In some embodiments, the baseline SOS2 mRNA level is indicated as a mass or percentage of SOS2 mRNA per total nucleic acids within the sample. In some embodiments, the baseline SOS2 mRNA level is indicated relative to another mRNA level, such as an mRNA level of a housekeeping gene, within the sample. In some embodiments, the baseline SOS2 mRNA measurement is a baseline tissue SOS2 mRNA measurement. Examples of baseline tissue SOS2 mRNA measurements include a baseline liver SOS2 mRNA measurement, a baseline kidney SOS2 mRNA measurement, a baseline eye SOS2 mRNA measurement, or a baseline adipose tissue SOS2 mRNA measurement. In some embodiments, the baseline SOS2 mRNA measurement is a baseline circulating SOS2 mRNA measurement. In some embodiments, the baseline SOS2 mRNA measurement is obtained by an assay such as a polymerase chain reaction (PCR) assay. In some embodiments, the PCR comprises quantitative PCR (qPCR). In some embodiments, the PCR comprises reverse transcription of the SOS2 mRNA.

[0234] Some embodiments of the methods described herein include obtaining a sample from a subject. In some embodiments, the baseline measurement is obtained in a sample obtained from the subject. In some embodiments, the sample is obtained from the subject prior to administration or treatment of the subject with a composition described herein. In some embodiments, a baseline measurement is obtained in a sample obtained from the subject prior to administering the composition to the subject. In some embodiments, the sample is obtained from the subject in a fasted state. In some embodiments, the sample is obtained from the subject after an overnight fasting period. In some embodiments, the sample is obtained from the subject in a fed state.

[0235] In some embodiments, the sample comprises a fluid. In some embodiments, the sample is a fluid sample. In some embodiments, the sample is a blood, plasma, or serum sample. In some embodiments, the sample comprises blood. In some embodiments, the sample is a blood sample. In some embodiments, the sample is a whole-blood sample. In some embodiments, the blood is fractionated or centrifuged. In some embodiments, the sample comprises plasma. In some embodiments, the sample is a plasma sample. In some embodiments, the sample comprises serum. In some embodiments, the sample is a serum sample.

[0236] In some embodiments, the sample comprises a tissue. In some embodiments, the sample is a tissue sample. In some embodiments, the sample comprises liver tissue. In some embodiments, the sample is a liver sample. In some embodiments, the sample comprises adipose tissue. In some embodiments, the sample is an adipose sample. In some embodiments, the tissue sample comprises brown adipose tissue or white adipose tissue. In some embodiments, the sample comprises kidney tissue. In some embodiments, the sample is a kidney sample. In some embodiments, the sample comprises eye tissue. In some embodiments, the sample is an eye sample. In some embodiments, the sample comprises an eye fluid. In some embodiments, the sample comprises a hair or scalp sample. In some examples, the baseline SOS2 mRNA measurement, or the baseline SOS2 protein measurement, may be obtained in a liver, adipose, eye, or kidney sample from the patient. In some embodiments, the sample comprises cardiac tissue such as ventricular or atrial tissue. In some embodiments, the sample comprises a cerebral tissue or fluid. In some embodiments, the sample comprises a neural tissue or neural fluid. In some embodiments, the sample comprises a muscle tissue or fluid. The sample may comprise or consist of hepatocytes. The sample may comprise or consist of podocytes.

### D. Effects

[0237] In some embodiments, the composition or administration of the composition affects a measurement such as include a glomerular filtration rate (GFR) or estimated glomerular filtration rate (eGFR) measurement, a creatinine measurement, a blood urea nitrogen (BUN) measurement, a proteinuria measurement, a microalbuminuria measurement, a blood urate measurement, a urine albumin creatine ratio, a systolic blood pressure (SBP) measurement, a diastolic blood pressure (DBP) measurement, a mean arterial pressure measurement, a pulse pressure measurement, a intraocular pressure (IOP) measurement, a cup-disc ratio, a RNFL thickness measurement, a optic nerve head cupping measurement, a RPE pigmentation and reflectivity measurement, a retinal thickness measurement, a drusen measurement, a macular hemorrhage measurement, a choroidal neovascularization measurement, a edema measurement, a microaneurysm measurement, a intraretinal hemorrhage measurement, a macular ischemia measurement, a neovascularization measurement, a vitreous hemorrhage measurement, a traction retinal detachment measurement, a hemoglobin A1C measurement, a body mass index (BMI), a body weight measurement, a waist circumference measurement, a hip circumference measurement, a waist-hip ratio (WHR), a body fat percentage, a blood glucose measurement, a glucose tolerance measurement, a insulin sensitivity measurement, a blood triglyceride measurement, a non-HDL cholesterol measurement, a alanine aminotransferase (ALT) measurement, a aspartate aminotransferase (AST) measurement, a liver fat percentage (LFP) measurement, a liver fibrosis measurement, a liver fibrosis score, a NAFLD activity score, a blood gamma-glutamyl transferase (GGT) measurement, a hair count measurement, a hair thickness measurement, a hair density measurement, a SOS2 protein measurement, or a SOS2 mRNA measurement, relative to the baseline measurement.

[0238] Some embodiments of the methods described herein include obtaining the measurement from a subject. For example, the measurement may be obtained from the subject after treating the subject. In some embodiments, the measurement is obtained in a second sample (such as a fluid or tissue sample described herein) obtained from the subject after the composition is administered to the subject. In some embodiments, the measurement is an indication that the disorder has been treated.

[0239] In some embodiments, the measurement is obtained directly from the subject. In some embodiments, the measurement is obtained noninvasively using an imaging device. In some embodiments, the measurement is obtained in a second sample from the subject. In some embodiments, the measurement is obtained in one or more histological tissue sections. In some embodiments, the measurement is obtained by performing an assay on the second sample obtained from the subject. In some embodiments, the measurement is obtained by an assay, such as an assay described herein. In some embodiments, the assay is an immunoassay, a colorimetric assay, a fluorescence assay, or a PCR assay. In some embodiments, the measurement is obtained by an assay such as an immunoassay, a colorimetric assay, or a fluorescence assay. In some embodiments, the measurement is obtained by PCR. In some embodiments, the measurement is obtained by histology. In some embodiments, the measurement is obtained by observation. In some embodiments, additional measurements are made, such as in a 3rd sample, a 4th sample, or a fifth sample.

[0240] In some embodiments, the measurement is obtained within 1 hour, within 2 hours, within 3 hours, within 4 hours, within 5 hours, within 6 hours, within 12 hours, within 18 hours, or within 24 hours after the administration of the composition. In some embodiments, the measurement is obtained within 1 day, within 2 days, within 3 days, within 4 days, within 5 days, within 6 days, or within 7 days after the administration of the composition. In some embodiments, the measurement is obtained within 1 week, within 2 weeks, within 3 weeks, within 1 month, within 2 months, within 3 months, within 6 months, within 1 year, within 2 years, within 3 years, within 4 years, or within 5 years after the administration of the composition. In some embodiments, the measurement is obtained after 1 hour, after 2 hours, after 3 hours, after 4 hours, after 5 hours, after 6 hours, after 12 hours, after 18 hours, or after 24 hours after the administration of the composition. In some embodiments, the measurement is obtained after 1 day, after 2 days, after 3 days, after 4 days, after 5 days, after 6 days, or after 7 days after the administration of the composition. In some embodiments, the measurement is obtained after 1 week, after 2 weeks, after 3 weeks, after 1 month, after 2 months, after 3 months, after 6 months, after 1 year, after 2 years, after 3 years, after 4 years, or after 5 years, following the administration of the composition.

[0241] In some embodiments, the composition reduces the measurement relative to the baseline measurement. In some embodiments, the reduction is measured in a second tissue sample obtained from the subject after administering the composition to the subject. In some embodiments, the reduction is measured directly in the subject after administering the composition to the subject. In some embodiments, the measurement is decreased by about 2.5% or more, about 5% or more, or about 7.5% or more, relative to the baseline measurement. In some embodiments, the measurement is decreased by about 10% or more, relative to the baseline measurement. In some embodiments, the measurement is decreased by about 20% or more, about 30% or more, about 40% or more, about 50% or more, about 60% or more, about 70% or more, about 80% or more, about 90% or more, relative to the baseline measurement. In some embodiments, the measurement is decreased by no more than about 2.5%, no more than about 5%, or no more than about 7.5%, relative to the baseline measurement. In some embodiments, the measurement is decreased by no more than about 10%, relative to the baseline measurement. In some embodiments, the measurement is decreased by no more than about 20%, no more than about 30%, no more than about 40%, no more than about 50%, no more than about 60%, no more than about 70%, no more than about 80%, no more than about 90%, or no more than about 95% relative to the baseline measurement. In some embodiments, the measurement is decreased by 2.5%, 5%, 7.5%, 10%, 20%, 30%, 40%, 50%, 60%, 70%, 80%, 90%, or 95%, or by a range defined by any of the two aforementioned percentages.

[0242] In some embodiments, the composition increases the measurement relative to the baseline measurement. In some embodiments, the increase is measured in a second tissue sample obtained from the subject after administering the composition to the subject. In some embodiments, the increase is measured directly in the subject after administering the composition to the subject. In some embodiments, the measurement is increased by about 2.5% or more, about 5% or more, or about 7.5% or more, relative to the baseline measurement. In some embodiments, the measurement is increased by about 10% or more, relative to the baseline measurement. In some embodiments, the measurement is increased by about 20% or more, about 30% or more, about 40% or more, about 50% or more, about 60% or more, about 70% or more, about 80% or more, about 90% or more, relative to the baseline measurement. In some embodiments, the measurement is increased by about 100% or more, increased by about 250% or more, increased by about 500% or more, increased by about 750% or more, or increased by about 1000% or more, relative to the baseline measurement. In some embodiments, the measurement is increased by no more than about 2.5%, no more than about 5%, or no more than about 7.5%, relative to the baseline measurement. In some embodiments, the measurement is increased by no more than about 10%, relative to the baseline measurement. In some embodiments, the measurement is increased by no more than about 20%, no more than about 30%, no more than about 40%, no more than about 50%, no more than about 60%, no more than about 70%, no more than about 80%, no more than about 90%, or no more than about 100% relative to the baseline measurement. In some embodiments, the measurement is increased by no more than about 100%, increased by no more than about 250%, increased by no more than about 500%, increased by no more than about 750%, or increased by no more than about 1000%, relative to the baseline measurement. In some embodiments, the measurement is increased by 2.5%, 5%, 7.5%, 10%, 20%, 30%, 40%, 50%, 60%, 70%, 80%, 90%, 100%, 250%, 500%, 750%, or 1000%, orby a range defined by any of the two aforementioned percentages.

[0243] In some embodiments, the measurement is a GFR or eGFR measurement. In some embodiments, the measurement is a GFR measurement. In some embodiments, the measurement is a eGFR measurement. The GFR or eGFR measurement may be indicated in units of volume per time (e.g. mL/min). The GFR measurement may be obtained using a clearance measurement such as a creatinine clearance measurement. The GFR may also be determined by injecting insulin, sinistrin, a radioactive tracer, or cystatin C, and determining a clearance rate. The eGFR measurement may be also be obtained using a clearance estimate such as an estimation of serum creatinine clearance. The GFR or eGFR may be 100-130 mL/min/1.73 m², 90-100 mL/min/1.73 m². The GFR or eGFR may be below 90 or 100 mL/min/1.73 m². The GFR or eGFR may be indicative of normal kidney function, CKD1, CKD2, CKD3, CKD4, or CKD5, as indicated by a kidney function index.

[0244] In some embodiments, the composition increases the GFR measurement relative to the baseline GFR or eGFR measurement. In some embodiments, the composition increases the eGFR measurement relative to the baseline GFR or eGFR measurement. In some embodiments, the increase is measured directly in the subject after administering the composition to the subject. In some embodiments, the GFR or eGFR measurement is increased by about 2.5% or more, about 5% or more, or about 7.5% or more, relative to the baseline GFR or eGFR measurement. In some embodiments, the GFR or eGFR measurement is increased by about 10% or more, relative to the baseline GFR or eGFR measurement. In some embodiments, the GFR or eGFR measurement is increased by about 20% or more, about 30% or more, about 40% or more, about 50% or more, about 60% or more, about 70% or more, about 80% or more, about 90% or more, relative to the baseline GFR or eGFR measurement. In some embodiments, the GFR or eGFR measurement is increased by about 100% or more, increased by about 250% or more, increased by about 500% or more, increased by about 750% or more, or increased by about 1000% or more, relative to the baseline GFR or eGFR measurement. In some embodiments, the GFR or eGFR measurement is increased by no more than about 2.5%, no more than about 5%, or no more than about 7.5%, relative to the baseline GFR or eGFR measurement. In some embodiments, the GFR or eGFR measurement is increased by no more than about 10%, relative to the baseline GFR or eGFR measurement. In some embodiments, the GFR or eGFR measurement is increased by no more than about 20%, no more than about 30%, no more than about 40%, no more than about 50%, no more than about 60%, no more than about 70%, no more than about 80%, no more than about 90%, or no more than about 100% relative to the baseline GFR or eGFR measurement. In some embodiments, the GFR or eGFR measurement is increased by no more than about 100%, increased by no more than about 250%, increased by no more than about 500%, increased by no more than about 750%, or increased by no more than about 1000%, relative to the baseline GFR or eGFR measurement. In some embodiments, the GFR or eGFR measurement is increased by 2.5%, 5%, 7.5%, 10%, 20%, 30%, 40%, 50%, 60%, 70%, 80%, 90%, 100%, 250%, 500%, 750%, or 1000%, or by a range defined by any of the two aforementioned percentages.

[0245] In some embodiments, the measurement is a creatinine measurement. In some embodiments, the creatinine measurement is a creatinine concentration. In some embodiments, the creatinine measurement is a circulating (e.g. serum or plasma) creatinine measurement. In some embodiments, the creatinine measurement is a urine creatinine measurement. In some embodiments, the creatinine measurement is obtained by an assay such as an immunoassay, a colorimetric assay, or a fluorescence assay. The circulating creatinine measurement may be about 0.5-1.3 mg/dL. The circulating creatinine measurement may be above 1.3 mg/dL. The circulating creatinine measurement may be within, above, or below a reference range. The urine creatinine measurement may be within, above, or below a reference range.

[0246] In some embodiments, the composition reduces the creatinine measurement relative to the baseline creatinine measurement. In some embodiments, the reduction is measured in a second fluid sample obtained from the subject after administering the composition to the subject. In some embodiments, the reduction is measured directly in the subject after administering the composition to the subject. In some embodiments, the creatinine measurement is decreased by about 2.5% or more, about 5% or more, or about 7.5% or more, relative to the baseline creatinine measurement. In some embodiments, the creatinine measurement is decreased by about 10% or more, relative to the baseline creatinine measurement. In some embodiments, the creatinine measurement is decreased by about 20% or more, about 30% or more, about 40% or more, about 50% or more, about 60% or more, about 70% or more, about 80% or more, about 90% or more, relative to the baseline creatinine measurement. In some embodiments, the creatinine measurement is decreased by no more than about 2.5%, no more than about 5%, or no more than about 7.5%, relative to the baseline creatinine measurement. In some embodiments, the creatinine measurement is decreased by no more than about 10%, relative to the baseline creatinine measurement. In some embodiments, the creatinine measurement is decreased by no more than about 20%, no more than about 30%, no more than about 40%, no more than about 50%, no more than about 60%, no more than about 70%, no more than about 80%, or no more than about 90% relative to the baseline creatinine measurement. In some embodiments, the creatinine measurement is decreased by 2.5%, 5%, 7.5%, 10%, 20%, 30%, 40%, 50%, 60%, 70%, 80%, or 90%, or by a range defined by any of the two aforementioned percentages.

[0247] In some embodiments, the measurement is a blood urea nitrogen (BUN) measurement. In some embodiments, the BUN measurement is a BUN concentration. In some embodiments, the BUN measurement is a circulating BUN measurement. In some embodiments, the BUN measurement is obtained by an assay such as an immunoassay, a colorimetric assay, or a fluorescence assay. In some embodiments, the BUN is 6-20 mg/dL. In some embodiments, the BUN is over 20 mg/dL. A normal BUN range is 6-20 mg/dL. In some embodiments, the measurement is a BUN/creatinine ratio.

[0248] In some embodiments, the composition reduces the BUN measurement relative to the baseline BUN measurement. In some embodiments, the reduction is measured in a second blood sample obtained from the subject after administering the composition to the subject. In some embodiments, the reduction is measured directly in the subject after administering the composition to the subject. In some embodiments, the BUN measurement is decreased by about 2.5% or more, about 5% or more, or about 7.5% or more, relative to the baseline BUN measurement. In some embodiments, the BUN measurement is decreased by about 10% or more, relative to the baseline BUN measurement. In some embodiments, the BUN measurement is decreased by about 20% or more, about 30% or more, about 40% or more, about 50% or more, about 60% or more, about 70% or more, about 80% or more, about 90% or more, relative to the baseline BUN measurement. In some embodiments, the BUN measurement is decreased by no more than about 2.5%, no more than about 5%, or no more than about 7.5%, relative to the baseline BUN measurement. In some embodiments, the BUN measurement is decreased by no more than about 10%, relative to the baseline BUN measurement. In some embodiments, the BUN measurement is decreased by no more than about 20%, no more than about 30%, no more than about 40%, no more than about 50%, no more than about 60%, no more than about 70%, no more than about 80%, or no more than about 90% relative to the baseline BUN measurement. In some embodiments, the BUN measurement is decreased by 2.5%, 5%, 7.5%, 10%, 20%, 30%, 40%, 50%, 60%, 70%, 80%, or 90%, or by a range defined by any of the two aforementioned percentages.

[0249] In some embodiments, the measurement is a proteinuria measurement. The proteinuria measurement may be indicated as a concentration, a ratio, or a mass/unit time (e.g. mg/mmol urine, protein/creatinine, or mg protein/hr). In some embodiments, the proteinuria measurement includes a proteinuria concentration. In some embodiments, the proteinuria measurement is a urine proteinuria measurement. In some embodiments, the proteinuria measurement is obtained by an assay such as an immunoassay, a colorimetric assay, or a fluorescence assay. In some embodiments, the proteinuria measurement is indicative of proteinuria in the subject. In some embodiments, the proteinuria measurement is indicative of a lack of proteinuria in the subject. In some embodiments, the measurement is a urine protein/creatinine ratio.

[0250] In some embodiments, the composition reduces the proteinuria measurement relative to the baseline proteinuria measurement. In some embodiments, the reduction is measured in a second fluid sample obtained from the subject after administering the composition to the subject. In some embodiments, the reduction is measured directly in the subject after administering the composition to the subject. In some embodiments, the proteinuria measurement is decreased by about 2.5% or more, about 5% or more, or about 7.5% or more, relative to the baseline proteinuria measurement. In some embodiments, the proteinuria measurement is decreased by about 10% or more, relative to the baseline proteinuria measurement. In some embodiments, the proteinuria measurement is decreased by about 20% or more, about 30% or more, about 40% or more, about 50% or more, about 60% or more, about 70% or more, about 80% or more, about 90% or more, relative to the baseline proteinuria measurement. In some embodiments, the proteinuria measurement is decreased by no more than about 2.5%, no more than about 5%, or no more than about 7.5%, relative to the baseline proteinuria measurement. In some embodiments, the proteinuria measurement is decreased by no more than about 10%, relative to the baseline proteinuria measurement. In some embodiments, the proteinuria measurement is decreased by no more than about 20%, no more than about 30%, no more than about 40%, no more than about 50%, no more than about 60%, no more than about 70%, no more than about 80%, or no more than about 90% relative to the baseline proteinuria measurement. In some embodiments, the proteinuria measurement is decreased by 2.5%, 5%, 7.5%, 10%, 20%, 30%, 40%, 50%, 60%, 70%, 80%, or 90%, or by a range defined by any of the two aforementioned percentages.

[0251] In some embodiments, the measurement is a microalbuminuria measurement. The microalbuminuria measurement may be indicated as a concentration, a ratio, or a mass/unit time (e.g. mg/mmol urine, albumin/creatinine, or mg albumin/hr). In some embodiments, the microalbuminuria measurement includes a microalbuminuria concentration. In some embodiments, the microalbuminuria measurement is a urine microalbuminuria measurement. In some embodiments, the microalbuminuria measurement is obtained by an assay such as an immunoassay, a colorimetric assay, or a fluorescence assay. In some embodiments, the microalbuminuria measurement is indicative of microalbuminuria in the subject. In some embodiments, the microalbuminuria measurement is indicative of a lack of microalbuminuria in the subject. In some embodiments, the measurement is a urine albumin/creatinine ratio. The microalbuminuria measurement may include a microalbuminuria measurement within a range or amount defined in Table 2.

[0252] In some embodiments, the composition reduces the microalbuminuria measurement relative to the baseline microalbuminuria measurement. In some embodiments, the reduction is measured in a second fluid sample obtained from the subject after administering the composition to the subject. In some embodiments, the reduction is measured directly in the subject after administering the composition to the subject. In some embodiments, the microalbuminuria measurement is decreased by about 2.5% or more, about 5% or more, or about 7.5% or more, relative to the baseline microalbuminuria measurement. In some embodiments, the microalbuminuria measurement is decreased by about 10% or more, relative to the baseline microalbuminuria measurement. In some embodiments, the microalbuminuria measurement is decreased by about 20% or more, about 30% or more, about 40% or more, about 50% or more, about 60% or more, about 70% or more, about 80% or more, about 90% or more, relative to the baseline microalbuminuria measurement. In some embodiments, the microalbuminuria measurement is decreased by no more than about 2.5%, no more than about 5%, or no more than about 7.5%, relative to the baseline microalbuminuria measurement. In some embodiments, the microalbuminuria measurement is decreased by no more than about 10%, relative to the baseline microalbuminuria measurement. In some embodiments, the microalbuminuria measurement is decreased by no more than about 20%, no more than about 30%, no more than about 40%, no more than about 50%, no more than about 60%, no more than about 70%, no more than about 80%, or no more than about 90% relative to the baseline microalbuminuria measurement. In some embodiments, the microalbuminuria measurement is decreased by 2.5%, 5%, 7.5%, 10%, 20%, 30%, 40%, 50%, 60%, 70%, 80%, or 90%, or by a range defined by any of the two aforementioned percentages.

[0253] In some embodiments, the measurement is a blood urate measurement. In some embodiments, the blood urate measurement is a blood urate concentration. In some embodiments, the blood urate measurement is obtained by an assay such as an immunoassay, a colorimetric assay, or a fluorescence assay. In some embodiments, the blood urate measurement is indicative of hyperuicemia. In some embodiments, the blood urate measurement is indicative of a lack of hyperuricemia. For example, the serum uric acid measurement may be 6 mg/dL or less, 7 mg/dL or less, or 5.5 mg/dL or less.

[0254] In some embodiments, the composition reduces the blood urate measurement relative to the baseline blood urate measurement. In some embodiments, the reduction is measured in a second blood sample obtained from the subject after administering the composition to the subject. In some embodiments, the reduction is measured directly in the subject after administering the composition to the subject. In some embodiments, the blood urate measurement is decreased by about 2.5% or more, about 5% or more, or about 7.5% or more, relative to the baseline blood urate measurement. In some embodiments, the blood urate measurement is decreased by about 10% or more, relative to the baseline blood urate measurement. In some embodiments, the blood urate measurement is decreased by about 20% or more, about 30% or more, about 40% or more, about 50% or more, about 60% or more, about 70% or more, about 80% or more, about 90% or more, relative to the baseline blood urate measurement. In some embodiments, the blood urate measurement is decreased by no more than about 2.5%, no more than about 5%, or no more than about 7.5%, relative to the baseline blood urate measurement. In some embodiments, the blood urate measurement is decreased by no more than about 10%, relative to the baseline blood urate measurement. In some embodiments, the blood urate measurement is decreased by no more than about 20%, no more than about 30%, no more than about 40%, no more than about 50%, no more than about 60%, no more than about 70%, no more than about 80%, or no more than about 90% relative to the baseline blood urate measurement. In some embodiments, the blood urate measurement is decreased by 2.5%, 5%, 7.5%, 10%, 20%, 30%, 40%, 50%, 60%, 70%, 80%, or 90%, or by a range defined by any of the two aforementioned percentages.

[0255] In some embodiments, the measurement is a systolic blood (SBP) pressure measurement. In some embodiments, the SBP measurement is measured in mm of mercury (mm Hg). In some embodiments, the SBP measurement is obtained with a sphygmomanometer. The SBP measurement may be indicative of hypertension. The SBP measurement may be indicative of normal blood pressure. The SBP measurement may include a cerebral SBP measurement.

[0256] In some embodiments, the composition reduces the SBP measurement relative to the baseline SBP measurement. In some embodiments, the reduction is measured directly in the subject after administering the composition to the subject. In some embodiments, the SBP measurement is decreased by about 2.5% or more, about 5% or more, or about 7.5% or more, relative to the baseline SBP measurement. In some embodiments, the SBP measurement is decreased by about 10% or more, relative to the baseline SBP measurement. In some embodiments, the SBP measurement is decreased by about 20% or more, about 30% or more, about 40% or more, about 50% or more, about 60% or more, about 70% or more, about 80% or more, about 90% or more, relative to the baseline SBP measurement. In some embodiments, the SBP measurement is decreased by no more than about 2.5%, no more than about 5%, or no more than about 7.5%, relative to the baseline SBP measurement. In some embodiments, the SBP measurement is decreased by no more than about 10%, relative to the baseline SBP measurement. In some embodiments, the SBP measurement is decreased by no more than about 20%, no more than about 30%, no more than about 40%, no more than about 50%, no more than about 60%, no more than about 70%, no more than about 80%, or no more than about 90% relative to the baseline SBP measurement. In some embodiments, the SBP measurement is decreased by 2.5%, 5%, 7.5%, 10%, 20%, 30%, 40%, 50%, 60%, 70%, 80%, or 90%, or by a range defined by any of the two aforementioned percentages.

[0257] In some embodiments, the measurement is a diastolic blood (DBP) pressure measurement. In some embodiments, the DBP measurement is measured in mm of mercury (mm Hg). In some embodiments, the DBP measurement is obtained with a sphygmomanometer. The DBP measurement may be indicative of hypertension. The DBP measurement may be indicative of normal blood pressure. The DBP measurement may include a cerebral DBP measurement.

[0258] In some embodiments, the composition reduces the DBP measurement relative to the baseline DBP measurement. In some embodiments, the reduction is measured directly in the subject after administering the composition to the subject. In some embodiments, the DBP measurement is decreased by about 2.5% or more, about 5% or more, or about 7.5% or more, relative to the baseline DBP measurement. In some embodiments, the DBP measurement is decreased by about 10% or more, relative to the baseline DBP measurement. In some embodiments, the DBP measurement is decreased by about 20% or more, about 30% or more, about 40% or more, about 50% or more, about 60% or more, about 70% or more, about 80% or more, about 90% or more, relative to the baseline DBP measurement. In some embodiments, the DBP measurement is decreased by no more than about 2.5%, no more than about 5%, or no more than about 7.5%, relative to the baseline DBP measurement. In some embodiments, the DBP measurement is decreased by no more than about 10%, relative to the baseline DBP measurement. In some embodiments, the DBP measurement is decreased by no more than about 20%, no more than about 30%, no more than about 40%, no more than about 50%, no more than about 60%, no more than about 70%, no more than about 80%, or no more than about 90% relative to the baseline DBP measurement. In some embodiments, the DBP measurement is decreased by 2.5%, 5%, 7.5%, 10%, 20%, 30%, 40%, 50%, 60%, 70%, 80%, or 90%, or by a range defined by any of the two aforementioned percentages.

[0259] In some embodiments, the measurement is a mean arterial pressure (MAP) pressure measurement. In some embodiments, the MAP measurement is measured in mm of mercury (mm Hg). In some embodiments, the MAP measurement is obtained with a sphygmomanometer. The MAP measurement may be indicative of hypertension. The MAP measurement may be indicative of normal blood pressure. The MAP measurement may include a cerebral MAP measurement.

[0260] In some embodiments, the composition reduces the MAP measurement relative to the baseline MAP measurement. In some embodiments, the reduction is measured directly in the subject after administering the composition to the subject. In some embodiments, the MAP measurement is decreased by about 2.5% or more, about 5% or more, or about 7.5% or more, relative to the baseline MAP measurement. In some embodiments, the MAP measurement is decreased by about 10% or more, relative to the baseline MAP measurement. In some embodiments, the MAP measurement is decreased by about 20% or more, about 30% or more, about 40% or more, about 50% or more, about 60% or more, about 70% or more, about 80% or more, about 90% or more, relative to the baseline MAP measurement. In some embodiments, the MAP measurement is decreased by no more than about 2.5%, no more than about 5%, or no more than about 7.5%, relative to the baseline MAP measurement. In some embodiments, the MAP measurement is decreased by no more than about 10%, relative to the baseline MAP measurement. In some embodiments, the MAP measurement is decreased by no more than about 20%, no more than about 30%, no more than about 40%, no more than about 50%, no more than about 60%, no more than about 70%, no more than about 80%, or no more than about 90% relative to the baseline MAP measurement. In some embodiments, the MAP measurement is decreased by 2.5%, 5%, 7.5%, 10%, 20%, 30%, 40%, 50%, 60%, 70%, 80%, or 90%, or by a range defined by any of the two aforementioned percentages.

[0261] In some embodiments, the measurement is a pulse pressure measurement. In some embodiments, the pulse pressure measurement is measured in mm of mercury (mm Hg). In some embodiments, the pulse pressure measurement is obtained with a sphygmomanometer. The pulse pressure measurement may be indicative of hypertension. The pulse pressure measurement may be indicative of normal blood pressure. The pulse pressure measurement may include a cerebral pulse pressure measurement.

[0262] In some embodiments, the composition reduces the pulse pressure measurement relative to the baseline pulse pressure measurement. In some embodiments, the reduction is measured directly in the subject after administering the composition to the subject. In some embodiments, the pulse pressure measurement is decreased by about 2.5% or more, about 5% or more, or about 7.5% or more, relative to the baseline pulse pressure measurement. In some embodiments, the pulse pressure measurement is decreased by about 10% or more, relative to the baseline pulse pressure measurement. In some embodiments, the pulse pressure measurement is decreased by about 20% or more, about 30% or more, about 40% or more, about 50% or more, about 60% or more, about 70% or more, about 80% or more, about 90% or more, relative to the baseline pulse pressure measurement. In some embodiments, the pulse pressure measurement is decreased by no more than about 2.5%, no more than about 5%, or no more than about 7.5%, relative to the baseline pulse pressure measurement. In some embodiments, the pulse pressure measurement is decreased by no more than about 10%, relative to the baseline pulse pressure measurement. In some embodiments, the pulse pressure measurement is decreased by no more than about 20%, no more than about 30%, no more than about 40%, no more than about 50%, no more than about 60%, no more than about 70%, no more than about 80%, or no more than about 90% relative to the baseline pulse pressure measurement. In some embodiments, the pulse pressure measurement is decreased by 2.5%, 5%, 7.5%, 10%, 20%, 30%, 40%, 50%, 60%, 70%, 80%, or 90%, or by a range defined by any of the two aforementioned percentages.

[0263] In some embodiments, the measurement is a intraocular pressure (IOP) measurement. The IOP may be measured using a tonometer. The IOP measurement may be in millimeters of mercury (mmHg). The IOP measurement may be indicative of a normal IOP. The IOP measurement may be indicative of abnormal or high IOP.

[0264] In some embodiments, the composition reduces the IOP measurement relative to the baseline IOP measurement. In some embodiments, the reduction is measured directly in the subject after administering the composition to the subject. In some embodiments, the IOP measurement is decreased by about 2.5% or more, about 5% or more, or about 7.5% or more, relative to the baseline IOP measurement. In some embodiments, the IOP measurement is decreased by about 10% or more, relative to the baseline IOP measurement. In some embodiments, the IOP measurement is decreased by about 20% or more, about 30% or more, about 40% or more, about 50% or more, about 60% or more, about 70% or more, about 80% or more, about 90% or more, relative to the baseline IOP measurement. In some embodiments, the IOP measurement is decreased by no more than about 2.5%, no more than about 5%, or no more than about 7.5%, relative to the baseline IOP measurement. In some embodiments, the IOP measurement is decreased by no more than about 10%, relative to the baseline IOP measurement. In some embodiments, the IOP measurement is decreased by no more than about 20%, no more than about 30%, no more than about 40%, no more than about 50%, no more than about 60%, no more than about 70%, no more than about 80%, or no more than about 90% relative to the baseline IOP measurement. In some embodiments, the IOP measurement is decreased by 2.5%, 5%, 7.5%, 10%, 20%, 30%, 40%, 50%, 60%, 70%, 80%, or 90%, or by a range defined by any of the two aforementioned percentages.

[0265] In some embodiments, the measurement is a measurement of optic nerve head cupping. The measurement of optic nerve head cupping may be a cup-disc ratio measurement. The cup-disc ratio may be measured using a slit lamp. The cup-disc ratio measurement may be indicative of a normal cup-disc ratio. The cup-disc ratio measurement may be indicative of a high or abnormal cup-disc ratio.

[0266] In some embodiments, the composition reduces the cup-disc ratio measurement relative to the baseline cup-disc ratio measurement. In some embodiments, the reduction is measured directly in the subject after administering the composition to the subject. In some embodiments, the cup-disc ratio measurement is decreased by about 2.5% or more, about 5% or more, or about 7.5% or more, relative to the baseline cup-disc ratio measurement. In some embodiments, the cup-disc ratio measurement is decreased by about 10% or more, relative to the baseline cup-disc ratio measurement. In some embodiments, the cup-disc ratio measurement is decreased by about 20% or more, about 30% or more, about 40% or more, about 50% or more, about 60% or more, about 70% or more, about 80% or more, about 90% or more, relative to the baseline cup-disc ratio measurement. In some embodiments, the cup-disc ratio measurement is decreased by no more than about 2.5%, no more than about 5%, or no more than about 7.5%, relative to the baseline cup-disc ratio measurement. In some embodiments, the cup-disc ratio measurement is decreased by no more than about 10%, relative to the baseline cup-disc ratio measurement. In some embodiments, the cup-disc ratio measurement is decreased by no more than about 20%, no more than about 30%, no more than about 40%, no more than about 50%, no more than about 60%, no more than about 70%, no more than about 80%, or no more than about 90% relative to the baseline cup-disc ratio measurement. In some embodiments, the cup-disc ratio measurement is decreased by 2.5%, 5%, 7.5%, 10%, 20%, 30%, 40%, 50%, 60%, 70%, 80%, or 90%, or by a range defined by any of the two aforementioned percentages.

[0267] In some embodiments, the measurement is a retinal nerve fiber layer (RNFL) thickness measurement. The RNFL thickness may be measured using optical coherence tomography. The RNFL thickness measurement may be in μm. The RNFL thickness measurement may be indicative of a normal RNFL thickness measurement. The RNFL thickness measurement may be indicative of a low or abnormal RNFL thickness measurement.

[0268] In some embodiments, the composition increases the RNFL thickness measurement relative to the baseline RNFL thickness measurement. In some embodiments, the increase is measured directly in the subject after administering the composition to the subject. In some embodiments, the RNFL thickness measurement is increased by about 2.5% or more, about 5% or more, or about 7.5% or more, relative to the baseline RNFL thickness measurement. In some embodiments, the RNFL thickness measurement is increased by about 10% or more, relative to the baseline RNFL thickness measurement. In some embodiments, the RNFL thickness measurement is increased by about 20% or more, about 30% or more, about 40% or more, about 50% or more, about 60% or more, about 70% or more, about 80% or more, about 90% or more, relative to the baseline RNFL thickness measurement. In some embodiments, the RNFL thickness measurement is increased by no more than about 2.5%, no more than about 5%, or no more than about 7.5%, relative to the baseline RNFL thickness measurement. In some embodiments, the RNFL thickness measurement is increased by no more than about 10%, relative to the baseline RNFL thickness measurement. In some embodiments, the RNFL thickness measurement is increased by no more than about 20%, no more than about 30%, no more than about 40%, no more than about 50%, no more than about 60%, no more than about 70%, no more than about 80%, or no more than about 90% relative to the baseline RNFL thickness measurement. In some embodiments, the RNFL thickness measurement is increased by 2.5%, 5%, 7.5%, 10%, 20%, 30%, 40%, 50%, 60%, 70%, 80%, or 90%, or by a range defined by any of the two aforementioned percentages.

[0269] In some embodiments, the measurement is a retinal thickness measurement. The retinal thickness may be measured using optical coherence tomography. The retinal thickness measurement may be in m. The retinal thickness measurement may be indicative of a normal retinal thickness measurement. The retinal thickness measurement may be indicative of a high or abnormal retinal thickness measurement.

[0270] In some embodiments, the composition reduces the retinal thickness measurement relative to the baseline retinal thickness measurement. In some embodiments, the reduction is measured directly in the subject after administering the composition to the subject. In some embodiments, the retinal thickness measurement is decreased by about 2.5% or more, about 5% or more, or about 7.5% or more, relative to the baseline retinal thickness measurement. In some embodiments, the retinal thickness measurement is decreased by about 10% or more, relative to the baseline retinal thickness measurement. In some embodiments, the retinal thickness measurement is decreased by about 20% or more, about 30% or more, about 40% or more, about 50% or more, about 60% or more, about 70% or more, about 80% or more, about 90% or more, relative to the baseline retinal thickness measurement. In some embodiments, the retinal thickness measurement is decreased by no more than about 2.5%, no more than about 5%, or no more than about 7.5%, relative to the baseline retinal thickness measurement. In some embodiments, the retinal thickness measurement is decreased by no more than about 10%, relative to the baseline retinal thickness measurement. In some embodiments, the retinal thickness measurement is decreased by no more than about 20%, no more than about 30%, no more than about 40%, no more than about 50%, no more than about 60%, no more than about 70%, no more than about 80%, or no more than about 90% relative to the baseline retinal thickness measurement. In some embodiments, the retinal thickness measurement is decreased by 2.5%, 5%, 7.5%, 10%, 20%, 30%, 40%, 50%, 60%, 70%, 80%, or 90%, or by a range defined by any of the two aforementioned percentages.

[0271] In some embodiments, the measurement is a edema measurement. The edema may be measured using optical coherence tomography. The edema measurement may be in μm. The edema measurement may be indicative of a normal edema measurement. The edema measurement may be indicative of a high or abnormal edema measurement.

[0272] In some embodiments, the composition reduces the edema measurement relative to the baseline edema measurement. In some embodiments, the reduction is measured directly in the subject after administering the composition to the subject. In some embodiments, the edema measurement is decreased by about 2.5% or more, about 5% or more, or about 7.5% or more, relative to the baseline edema measurement. In some embodiments, the edema measurement is decreased by about 10% or more, relative to the baseline edema measurement. In some embodiments, the edema measurement is decreased by about 20% or more, about 30% or more, about 40% or more, about 50% or more, about 60% or more, about 70% or more, about 80% or more, about 90% or more, relative to the baseline edema measurement. In some embodiments, the edema measurement is decreased by no more than about 2.5%, no more than about 5%, or no more than about 7.5%, relative to the baseline edema measurement. In some embodiments, the edema measurement is decreased by no more than about 10%, relative to the baseline edema measurement. In some embodiments, the edema measurement is decreased by no more than about 20%, no more than about 30%, no more than about 40%, no more than about 50%, no more than about 60%, no more than about 70%, no more than about 80%, or no more than about 90% relative to the baseline edema measurement. In some embodiments, the edema measurement is decreased by 2.5%, 5%, 7.5%, 10%, 20%, 30%, 40%, 50%, 60%, 70%, 80%, or 90%, or by a range defined by any of the two aforementioned percentages.

[0273] In some embodiments, the measurement is a RPE pigmentation and reflectivity measurement. The RPE pigmentation and reflectivity measurement may be measured using optical coherence tomography. The RPE pigmentation and reflectivity measurement may be indicative of a normal RPE pigmentation and reflectivity measurement. The RPE pigmentation and reflectivity measurement may be indicative of abnormal RPE pigmentation and reflectivity.

[0274] In some embodiments, the composition reduces the RPE pigmentation and reflectivity measurement relative to the baseline RPE pigmentation and reflectivity measurement. In some embodiments, the reduction is measured directly in the subject after administering the composition to the subject. In some embodiments, the RPE pigmentation and reflectivity measurement is decreased by about 2.5% or more, about 5% or more, or about 7.5% or more, relative to the baseline RPE pigmentation and reflectivity measurement. In some embodiments, the RPE pigmentation and reflectivity measurement is decreased by about 10% or more, relative to the baseline RPE pigmentation and reflectivity measurement. In some embodiments, the RPE pigmentation and reflectivity measurement is decreased by about 20% or more, about 30% or more, about 40% or more, about 50% or more, about 60% or more, about 70% or more, about 80% or more, about 90% or more, relative to the baseline RPE pigmentation and reflectivity measurement. In some embodiments, the RPE pigmentation and reflectivity measurement is decreased by no more than about 2.5%, no more than about 5%, or no more than about 7.5%, relative to the baseline RPE pigmentation and reflectivity measurement. In some embodiments, the RPE pigmentation and reflectivity measurement is decreased by no more than about 10%, relative to the baseline RPE pigmentation and reflectivity measurement. In some embodiments, the RPE pigmentation and reflectivity measurement is decreased by no more than about 20%, no more than about 30%, no more than about 40%, no more than about 50%, no more than about 60%, no more than about 70%, no more than about 80%, or no more than about 90% relative to the baseline RPE pigmentation and reflectivity measurement. In some embodiments, the RPE pigmentation and reflectivity measurement is decreased by 2.5%, 5%, 7.5%, 10%, 20%, 30%, 40%, 50%, 60%, 70%, 80%, or 90%, or by a range defined by any of the two aforementioned percentages.

[0275] In some embodiments, the measurement is a drusen measurement. The drusen may be measured using an eye exam or retinal photography. The drusen measurement may be the size of the drusen or the number of the drusen. The drusen measurement may be indicative of a normal drusen measurement. The drusen measurement may be indicative of a high or abnormal drusen measurement.

[0276] In some embodiments, the composition reduces the drusen measurement relative to the baseline drusen measurement. In some embodiments, the reduction is measured directly in the subject after administering the composition to the subject. In some embodiments, the drusen measurement is decreased by about 2.5% or more, about 5% or more, or about 7.5% or more, relative to the baseline drusen measurement. In some embodiments, the drusen measurement is decreased by about 10% or more, relative to the baseline drusen measurement. In some embodiments, the drusen measurement is decreased by about 20% or more, about 30% or more, about 40% or more, about 50% or more, about 60% or more, about 70% or more, about 80% or more, about 90% or more, relative to the baseline drusen measurement. In some embodiments, the drusen measurement is decreased by no more than about 2.5%, no more than about 5%, or no more than about 7.5%, relative to the baseline drusen measurement. In some embodiments, the drusen measurement is decreased by no more than about 10%, relative to the baseline drusen measurement. In some embodiments, the drusen measurement is decreased by no more than about 20%, no more than about 30%, no more than about 40%, no more than about 50%, no more than about 60%, no more than about 70%, no more than about 80%, or no more than about 90% relative to the baseline drusen measurement. In some embodiments, the drusen measurement is decreased by 2.5%, 5%, 7.5%, 10%, 20%, 30%, 40%, 50%, 60%, 70%, 80%, or 90%, or by a range defined by any of the two aforementioned percentages.

[0277] In some embodiments, the measurement is a hemorrhage measurement. The hemorrhage measurement may be a vitreous hemorrhage. The hemorrhage measurement may be an intraretinal hemorrhage. The hemorrhage may be a macular hemorrhage. The hemorrhage may be measured using retinal photography. The hemorrhage measurement may be indicative of a normal hemorrhage measurement. The hemorrhage measurement may be indicative of an abnormal or high hemorrhage measurement.

[0278] In some embodiments, the composition reduces the hemorrhage measurement relative to the baseline hemorrhage measurement. In some embodiments, the reduction is measured directly in the subject after administering the composition to the subject. In some embodiments, the hemorrhage measurement is decreased by about 2.5% or more, about 5% or more, or about 7.5% or more, relative to the baseline hemorrhage measurement. In some embodiments, the hemorrhage measurement is decreased by about 10% or more, relative to the baseline hemorrhage measurement. In some embodiments, the hemorrhage measurement is decreased by about 20% or more, about 30% or more, about 40% or more, about 50% or more, about 60% or more, about 70% or more, about 80% or more, about 90% or more, relative to the baseline hemorrhage measurement. In some embodiments, the hemorrhage measurement is decreased by no more than about 2.5%, no more than about 5%, or no more than about 7.5%, relative to the baseline hemorrhage measurement. In some embodiments, the hemorrhage measurement is decreased by no more than about 10%, relative to the baseline hemorrhage measurement. In some embodiments, the hemorrhage measurement is decreased by no more than about 20%, no more than about 30%, no more than about 40%, no more than about 50%, no more than about 60%, no more than about 70%, no more than about 80%, or no more than about 90% relative to the baseline hemorrhage measurement. In some embodiments, the hemorrhage measurement is decreased by 2.5%, 5%, 7.5%, 10%, 20%, 30%, 40%, 50%, 60%, 70%, 80%, or 90%, or by a range defined by any of the two aforementioned percentages.

[0279] In some embodiments, the measurement is a macular ischemia measurement. The macular ischemia may be measured using fluorescein angiography or optical coherence tomography angiography. The macular ischemia measurement may be a measurement of the foveal avascular zone. The macular ischemia measurement may be indicative of a normal macular ischemia measurement. The macular ischemia measurement may be indicative of a high or abnormal macular ischemia measurement.

[0280] In some embodiments, the composition reduces the macular ischemia measurement relative to the baseline macular ischemia measurement. In some embodiments, the reduction is measured directly in the subject after administering the composition to the subject. In some embodiments, the macular ischemia measurement is decreased by about 2.5% or more, about 5% or more, or about 7.5% or more, relative to the baseline macular ischemia measurement. In some embodiments, the macular ischemia measurement is decreased by about 10% or more, relative to the baseline macular ischemia measurement. In some embodiments, the macular ischemia measurement is decreased by about 20% or more, about 30% or more, about 40% or more, about 50% or more, about 60% or more, about 70% or more, about 80% or more, about 90% or more, relative to the baseline macular ischemia measurement. In some embodiments, the macular ischemia measurement is decreased by no more than about 2.5%, no more than about 5%, or no more than about 7.5%, relative to the baseline macular ischemia measurement. In some embodiments, the macular ischemia measurement is decreased by no more than about 10%, relative to the baseline macular ischemia measurement. In some embodiments, the macular ischemia measurement is decreased by no more than about 20%, no more than about 30%, no more than about 40%, no more than about 50%, no more than about 60%, no more than about 70%, no more than about 80%, or no more than about 90% relative to the baseline macular ischemia measurement. In some embodiments, the macular ischemia measurement is decreased by 2.5%, 5%, 7.5%, 10%, 20%, 30%, 40%, 50%, 60%, 70%, 80%, or 90%, or by a range defined by any of the two aforementioned percentages.

[0281] In some embodiments, the measurement is a microaneurysm measurement. The microaneurysm may be measured using fluorescein angiography. The microaneurysm measurement may be the count of microaneurysms. The microaneurysm measurement may be indicative of a normal microaneurysm measurement. The microaneurysm measurement may be indicative of high or abnormal microaneurysm measurement.

[0282] In some embodiments, the composition reduces the microaneurysm measurement relative to the baseline microaneurysm measurement. In some embodiments, the reduction is measured directly in the subject after administering the composition to the subject. In some embodiments, the microaneurysm measurement is decreased by about 2.5% or more, about 5% or more, or about 7.5% or more, relative to the baseline microaneurysm measurement. In some embodiments, the microaneurysm measurement is decreased by about 10% or more, relative to the baseline microaneurysm measurement. In some embodiments, the microaneurysm measurement is decreased by about 20% or more, about 30% or more, about 40% or more, about 50% or more, about 60% or more, about 70% or more, about 80% or more, about 90% or more, relative to the baseline microaneurysm measurement. In some embodiments, the microaneurysm measurement is decreased by no more than about 2.5%, no more than about 5%, or no more than about 7.5%, relative to the baseline microaneurysm measurement. In some embodiments, the microaneurysm measurement is decreased by no more than about 10%, relative to the baseline microaneurysm measurement. In some embodiments, the microaneurysm measurement is decreased by no more than about 20%, no more than about 30%, no more than about 40%, no more than about 50%, no more than about 60%, no more than about 70%, no more than about 80%, or no more than about 90% relative to the baseline microaneurysm measurement. In some embodiments, the microaneurysm measurement is decreased by 2.5%, 5%, 7.5%, 10%, 20%, 30%, 40%, 50%, 60%, 70%, 80%, or 90%, or by a range defined by any of the two aforementioned percentages.

[0283] In some embodiments, the measurement is a neovascularization measurement. The neovascularization measurement may be a choroidal neovascularization measurement. The neovascularization measurement may be measured using imaging techniques such as fluorescein angiography. The neovascularization measurement may be an area of the neovascularization. The neovascularization measurement may be indicative of a normal neovascularization measurement. The neovascularization measurement may be indicative of a high or abnormal neovascularization measurement.

[0284] In some embodiments, the composition reduces the neovascularization measurement relative to the baseline neovascularization measurement. In some embodiments, the reduction is measured directly in the subject after administering the composition to the subject. In some embodiments, the neovascularization measurement is decreased by about 2.5% or more, about 5% or more, or about 7.5% or more, relative to the baseline neovascularization measurement. In some embodiments, the neovascularization measurement is decreased by about 10% or more, relative to the baseline neovascularization measurement. In some embodiments, the neovascularization measurement is decreased by about 20% or more, about 30% or more, about 40% or more, about 50% or more, about 60% or more, about 70% or more, about 80% or more, about 90% or more, relative to the baseline neovascularization measurement. In some embodiments, the neovascularization measurement is decreased by no more than about 2.5%, no more than about 5%, or no more than about 7.5%, relative to the baseline neovascularization measurement. In some embodiments, the neovascularization measurement is decreased by no more than about 10%, relative to the baseline neovascularization measurement. In some embodiments, the neovascularization measurement is decreased by no more than about 20%, no more than about 30%, no more than about 40%, no more than about 50%, no more than about 60%, no more than about 70%, no more than about 80%, or no more than about 90% relative to the baseline neovascularization measurement. In some embodiments, the neovascularization measurement is decreased by 2.5%, 5%, 7.5%, 10%, 20%, 30%, 40%, 50%, 60%, 70%, 80%, or 90%, or by a range defined by any of the two aforementioned percentages.

[0285] In some embodiments, the measurement is a traction retinal detachment measurement. The traction retinal detachment may be measured using imaging techniques, including optical coherence tomography. The traction retinal detachment measurement may be indicative of a normal retina. The traction retinal detachment measurement may be indicative of macular degeneration or diabetic retinopathy.

[0286] In some embodiments, the composition reduces the traction retinal detachment measurement relative to the baseline traction retinal detachment measurement. In some embodiments, the reduction is measured directly in the subject after administering the composition to the subject. In some embodiments, the traction retinal detachment measurement is decreased by about 2.5% or more, about 5% or more, or about 7.5% or more, relative to the baseline traction retinal detachment measurement. In some embodiments, the traction retinal detachment measurement is decreased by about 10% or more, relative to the baseline traction retinal detachment measurement. In some embodiments, the traction retinal detachment measurement is decreased by about 20% or more, about 30% or more, about 40% or more, about 50% or more, about 60% or more, about 70% or more, about 80% or more, about 90% or more, relative to the baseline traction retinal detachment measurement. In some embodiments, the traction retinal detachment measurement is decreased by no more than about 2.5%, no more than about 5%, or no more than about 7.5%, relative to the baseline traction retinal detachment measurement. In some embodiments, the traction retinal detachment measurement is decreased by no more than about 10%, relative to the baseline traction retinal detachment measurement. In some embodiments, the traction retinal detachment measurement is decreased by no more than about 20%, no more than about 30%, no more than about 40%, no more than about 50%, no more than about 60%, no more than about 70%, no more than about 80%, or no more than about 90% relative to the baseline traction retinal detachment measurement. In some embodiments, the traction retinal detachment measurement is decreased by 2.5%, 5%, 7.5%, 10%, 20%, 30%, 40%, 50%, 60%, 70%, 80%, or 90%, or by a range defined by any of the two aforementioned percentages.

[0287] In some embodiments, the measurement is a hemoglobin A1C measurement. In some embodiments, the hemoglobin A1C measurement is a hemoglobin A1C concentration. In some embodiments, the hemoglobin A1C measurement is a circulating hemoglobin A1C measurement. In some embodiments, the hemoglobin A1C measurement is obtained by an assay such as an immunoassay, a colorimetric assay, a fluorescence assay, or HPLC. The hemoglobin A1C measurement may be indicative of a healthy normal A1C measurement. The hemoglobin A1C measurement may be indicative of diabetes. The hemoglobin A1C measurement may be indicative of pre-diabetes.

[0288] In some embodiments, the composition reduces the hemoglobin A1C measurement relative to the baseline hemoglobin Ab C measurement. In some embodiments, the reduction is measured in a second fluid sample obtained from the subject after administering the composition to the subject. In some embodiments, the reduction is measured directly in the subject after administering the composition to the subject. In some embodiments, the hemoglobin A1C measurement is decreased by about 2.5% or more, about 50% or more, or about 7.50% or more, relative to the baseline hemoglobin A1C measurement. In some embodiments, the hemoglobin A1C measurement is decreased by about 10% or more, relative to the baseline hemoglobin A1C measurement. In some embodiments, the hemoglobin A1C measurement is decreased by about 20% or more, about 30% or more, about 40% or more, about 50% or more, about 60% or more, about 70% or more, about 80% or more, about 90% or more, relative to the baseline hemoglobin A1C measurement. In some embodiments, the hemoglobin A1C measurement is decreased by no more than about 2.5%, no more than about 5%, or no more than about 7.5%, relative to the baseline hemoglobin A1C measurement. In some embodiments, the hemoglobin A1C measurement is decreased by no more than about 10%, relative to the baseline hemoglobin A1C measurement. In some embodiments, the hemoglobin A1C measurement is decreased by no more than about 20%, no more than about 30%, no more than about 40%, no more than about 50%, no more than about 60%, no more than about 70%, no more than about 80%, or no more than about 90% relative to the baseline hemoglobin A1C measurement. In some embodiments, the hemoglobin A1C measurement is decreased by 2.5%, 5%, 7.5%, 10%, 20%, 30%, 40%, 50%, 60%, 70%, 80%, or 90%, or by a range defined by any of the two aforementioned percentages.

[0289] In some embodiments, the measurement is a body mass measurement. In some embodiments, the body mass measurement is a body mass index (BMI). BMI may be defined as a body mass divided by the square of body height, and may be expressed in units of kg/m². Body mass may be obtained using a scale. Body height may be measured using a ruler or a measuring tape. Body height may include the height of a standing subject. Body height may include a distance from the bottom of a subject's feet to the top of the subject's head. BMI may include BMI prime. The subject may have a BMI in a range exemplified in Table 3.

[0290] In some embodiments, the composition reduces the body mass measurement relative to the baseline body mass measurement. In some embodiments, the reduction is measured on the subject after administering the composition to the subject. In some embodiments, the body mass measurement is decreased by about 2.5% or more, about 5% or more, or about 7.5% or more, relative to the baseline body mass measurement. In some embodiments, the body mass measurement is decreased by about 10% or more, relative to the baseline body mass measurement. In some embodiments, the body mass measurement is decreased by about 20% or more, about 30% or more, about 40% or more, about 50% or more, about 60% or more, about 70% or more, about 80% or more, about 90% or more, relative to the baseline body mass measurement. In some embodiments, the body mass measurement is decreased by no more than about 2.5%, no more than about 5%, or no more than about 7.5%, relative to the baseline body mass measurement. In some embodiments, the body mass measurement is decreased by no more than about 10%, relative to the baseline body mass measurement. In some embodiments, the body mass measurement is decreased by no more than about 20%, no more than about 30%, no more than about 40%, no more than about 50%, no more than about 60%, no more than about 70%, no more than about 80%, or no more than about 90% relative to the baseline body mass measurement. In some embodiments, the body mass measurement is decreased by 2.5%, 5%, 7.5%, 10%, 20%, 30%, 40%, 50%, 60%, 70%, 80%, or 90%, or by a range defined by any of the two aforementioned percentages.

[0291] In some embodiments, the measurement is a waist circumference measurement. A waist circumference measurement may be obtained using a measuring tape.

[0292] In some embodiments, the composition reduces the waist circumference measurement relative to the baseline waist circumference measurement. In some embodiments, the reduction is measured on the subject after administering the composition to the subject. In some embodiments, the waist circumference measurement is decreased by about 2.5% or more, about 5% or more, or about 7.5% or more, relative to the baseline waist circumference measurement. In some embodiments, the waist circumference measurement is decreased by about 10% or more, relative to the baseline waist circumference measurement. In some embodiments, the waist circumference measurement is decreased by about 20% or more, about 30% or more, about 40% or more, about 50% or more, about 60% or more, about 70% or more, about 80% or more, about 90% or more, relative to the baseline waist circumference measurement. In some embodiments, the waist circumference measurement is decreased by no more than about 2.5%, no more than about 5%, or no more than about 7.5%, relative to the baseline waist circumference measurement. In some embodiments, the waist circumference measurement is decreased by no more than about 10%, relative to the baseline waist circumference measurement. In some embodiments, the waist circumference measurement is decreased by no more than about 20%, no more than about 30%, no more than about 40%, no more than about 50%, no more than about 60%, no more than about 70%, no more than about 80%, or no more than about 90% relative to the baseline waist circumference measurement. In some embodiments, the waist circumference measurement is decreased by 2.5%, 5%, 7.5%, 10%, 20%, 30%, 40%, 50%, 60%, 70%, 80%, or 90%, or by a range defined by any of the two aforementioned percentages.

[0293] In some embodiments, the measurement is a hip circumference measurement. A hip circumference measurement may be obtained using a measuring tape.

[0294] In some embodiments, the composition reduces the hip circumference measurement relative to the baseline hip circumference measurement. In some embodiments, the reduction is measured on the subject after administering the composition to the subject. In some embodiments, the hip circumference measurement is decreased by about 2.5% or more, about 5% or more, or about 7.5% or more, relative to the baseline hip circumference measurement. In some embodiments, the hip circumference measurement is decreased by about 10% or more, relative to the baseline hip circumference measurement. In some embodiments, the hip circumference measurement is decreased by about 20% or more, about 30% or more, about 40% or more, about 50% or more, about 60% or more, about 70% or more, about 80% or more, about 90% or more, relative to the baseline hip circumference measurement. In some embodiments, the hip circumference measurement is decreased by no more than about 2.5%, no more than about 5%, or no more than about 7.5%, relative to the baseline hip circumference measurement. In some embodiments, the hip circumference measurement is decreased by no more than about 10%, relative to the baseline hip circumference measurement. In some embodiments, the hip circumference measurement is decreased by no more than about 20%, no more than about 30%, no more than about 40%, no more than about 50%, no more than about 60%, no more than about 70%, no more than about 80%, or no more than about 90% relative to the baseline hip circumference measurement. In some embodiments, the hip circumference measurement is decreased by 2.5%, 5%, 7.5%, 10%, 20%, 30%, 40%, 50%, 60%, 70%, 80%, or 90%, or by a range defined by any of the two aforementioned percentages.

[0295] In some embodiments, the measurement is a waist-hip ratio. A waist-hip ratio may be obtained using a measuring tape.

[0296] In some embodiments, the composition reduces the waist-hip ratio measurement relative to the baseline waist-hip ratio measurement. In some embodiments, the reduction is measured on the subject after administering the composition to the subject. In some embodiments, the waist-hip ratio measurement is decreased by about 2.5% or more, about 5% or more, or about 7.5% or more, relative to the baseline waist-hip ratio measurement. In some embodiments, the waist-hip ratio measurement is decreased by about 10% or more, relative to the baseline waist-hip ratio measurement. In some embodiments, the waist-hip ratio measurement is decreased by about 20% or more, about 30% or more, about 40% or more, about 50% or more, about 60% or more, about 70% or more, or about 80% or more, relative to the baseline waist-hip ratio measurement. In some embodiments, the waist-hip ratio measurement is decreased by no more than about 2.5%, no more than about 5%, or no more than about 7.5%, relative to the baseline waist-hip ratio measurement. In some embodiments, the waist-hip ratio measurement is decreased by no more than about 10%, relative to the baseline waist-hip ratio measurement. In some embodiments, the waist-hip ratio measurement is decreased by no more than about 20%, no more than about 30%, no more than about 40%, no more than about 50%, no more than about 60%, no more than about 70%, or no more than about 80%, relative to the baseline waist-hip ratio measurement. In some embodiments, the waist-hip ratio measurement is decreased by 2.5%, 5%, 7.5%, 10%, 20%, 30%, 40%, 50%, 60%, 70%, or 80%, or by a range defined by any of the two aforementioned percentages.

[0297] In some embodiments, the measurement is a body fat percentage. A body fat percentage may be obtained using underwater weighing, whole-body air displacement plethysmography, near-infrared interactance, dual energy X-ray absorptiometry, bioelectrical impedance, or a skinfold test.

[0298] In some embodiments, the composition reduces the body fat percentage measurement relative to the baseline body fat percentage measurement. In some embodiments, the reduction is measured on the subject after administering the composition to the subject. In some embodiments, the body fat percentage measurement is decreased by about 2.5% or more, about 5% or more, or about 7.5% or more, relative to the baseline body fat percentage measurement. In some embodiments, the body fat percentage measurement is decreased by about 10% or more, relative to the baseline body fat percentage measurement. In some embodiments, the body fat percentage measurement is decreased by about 20% or more, about 30% or more, about 40% or more, about 50% or more, about 60% or more, about 70% or more, about 80% or more, about 90% or more, relative to the baseline body fat percentage measurement. In some embodiments, the body fat percentage measurement is decreased by no more than about 2.5%, no more than about 5%, or no more than about 7.5%, relative to the baseline body fat percentage measurement. In some embodiments, the body fat percentage measurement is decreased by no more than about 10%, relative to the baseline body fat percentage measurement. In some embodiments, the body fat percentage measurement is decreased by no more than about 20%, no more than about 30%, no more than about 40%, no more than about 50%, no more than about 60%, no more than about 70%, no more than about 80%, or no more than about 90% relative to the baseline body fat percentage measurement. In some embodiments, the body fat percentage measurement is decreased by 2.5%, 5%, 7.5%, 10%, 20%, 30%, 40%, 50%, 60%, 70%, 80%, or 90%, or by a range defined by any of the two aforementioned percentages.

[0299] In some embodiments, the measurement is a triglyceride measurement. In some embodiments, the triglyceride measurement is a triglyceride concentration (for example, mg/dL). In some embodiments, the triglyceride measurement is a circulating triglyceride measurement. In some embodiments, the triglyceride measurement is obtained by an assay such as an immunoassay, a colorimetric assay, or a fluorescence assay.

[0300] In some embodiments, the composition reduces the triglyceride measurement relative to the baseline triglyceride measurement. In some embodiments, the composition reduces circulating triglycerides relative to the baseline triglyceride measurement. In some embodiments, the reduced triglycerides are measured in a second sample obtained from the subject after administering the composition to the subject. In some embodiments, the triglyceride measurement is decreased by about 2.5% or more, about 5% or more, or about 7.5% or more, relative to the baseline triglyceride measurement. In some embodiments, the triglyceride measurement is decreased by about 10% or more, relative to the baseline triglyceride measurement. In some embodiments, the triglyceride measurement is decreased by about 20% or more, about 30% or more, about 40% or more, about 50% or more, about 60% or more, about 70% or more, about 80% or more, about 90% or more, or about 100%, relative to the baseline triglyceride measurement. In some embodiments, the triglyceride measurement is decreased by no more than about 2.5%, no more than about 5%, or no more than about 7.5%, relative to the baseline triglyceride measurement. In some embodiments, the triglyceride measurement is decreased by no more than about 10%, relative to the baseline triglyceride measurement. In some embodiments, the triglyceride measurement is decreased by no more than about 20%, no more than about 30%, no more than about 40%, no more than about 50%, no more than about 60%, no more than about 70%, no more than about 80%, no more than about 90%, or no more than about 100% relative to the baseline triglyceride measurement. In some embodiments, the triglyceride measurement is decreased by 2.5%, 5%, 7.5%, 10%, 20%, 30%, 40%, 50%, 60%, 70%, 80%, 90%, 100%, or by a range defined by any of the two aforementioned percentages.

[0301] In some embodiments, the measurement is a cholesterol measurement. In some embodiments, the cholesterol concentration is a total cholesterol measurement. In some embodiments, the cholesterol concentration is a non-high density lipoprotein (HDL) cholesterol measurement. In some embodiments, the cholesterol concentration is a low density lipoprotein (LDL) cholesterol measurement. In some embodiments, the cholesterol measurement is a cholesterol concentration. In some embodiments, the cholesterol measurement is a circulating cholesterol measurement. In some embodiments, the cholesterol measurement is a blood cholesterol measurement. In some embodiments, the cholesterol measurement is obtained by an assay such as an immunoassay, a colorimetric assay, or a fluorescence assay.

[0302] In some embodiments, the composition reduces the cholesterol measurement relative to the baseline cholesterol measurement. In some embodiments, the reduction is measured in a second sample obtained from the subject after administering the composition to the subject. In some embodiments, the cholesterol measurement is decreased by about 2.5% or more, about 5% or more, or about 7.5% or more, relative to the baseline cholesterol measurement. In some embodiments, the cholesterol measurement is decreased by about 10% or more, relative to the baseline cholesterol measurement. In some embodiments, the cholesterol measurement is decreased by about 20% or more, about 30% or more, about 40% or more, about 50% or more, about 60% or more, about 70% or more, about 80% or more, about 90% or more, relative to the baseline cholesterol measurement. In some embodiments, the cholesterol measurement is decreased by no more than about 2.5%, no more than about 5%, or no more than about 7.5%, relative to the baseline cholesterol measurement. In some embodiments, the cholesterol measurement is decreased by no more than about 10%, relative to the baseline cholesterol measurement. In some embodiments, the cholesterol measurement is decreased by no more than about 20%, no more than about 30%, no more than about 40%, no more than about 50%, no more than about 60%, no more than about 70%, no more than about 80%, or no more than about 90%, relative to the baseline cholesterol measurement. In some embodiments, the cholesterol measurement is decreased by 2.5%, 5%, 7.5%, 10%, 20%, 30%, 40%, 50%, 60%, 70%, 80%, or 90%, or by a range defined by any of the two aforementioned percentages.

[0303] In some embodiments, the measurement is a liver enzyme measurement. In some embodiments, the liver enzyme measurement is an alanine aminotransferase (ALT) measurement. In some embodiments, the liver enzyme measurement is an aspartate aminotransferase (AST) measurement. In some embodiments, the liver enzyme measurement comprises an ALT/AST ratio, or comprises an AST/ALT ratio.

[0304] In some embodiments, the measurement is a alanine aminotransferase (ALT) measurement. In some embodiments, the ALT measurement is a ALT concentration (for example, Units/dL). In some embodiments, the ALT measurement is a circulating ALT measurement, for example, a blood, serum, or plasma ALT measurement. In some embodiments, the ALT measurement is obtained by an assay such as an immunoassay, a colorimetric assay, or a fluorescence assay. In some embodiments, the ALT measurement is within a reference range. In some embodiments, the ALT measurement is above the reference range.

[0305] In some embodiments, the composition reduces the ALT measurement relative to the baseline ALT measurement. In some embodiments, the reduced ALT is measured in a second blood sample, plasma sample, or serum sample obtained from the subject after administering the composition to the subject. In some embodiments, the ALT measurement is decreased by about 2.5% or more, about 5% or more, or about 7.5% or more, relative to the baseline ALT measurement. In some embodiments, the ALT measurement is decreased by about 10% or more, relative to the baseline ALT measurement. In some embodiments, the ALT measurement is decreased by about 20% or more, about 30% or more, about 40% or more, about 50% or more, about 60% or more, about 70% or more, about 80% or more, about 90% or more, relative to the baseline ALT measurement. In some embodiments, the ALT measurement is decreased by no more than about 2.5%, no more than about 5%, or no more than about 7.5%, relative to the baseline ALT measurement. In some embodiments, the ALT measurement is decreased by no more than about 10%, relative to the baseline ALT measurement. In some embodiments, the ALT measurement is decreased by no more than about 20%, no more than about 30%, no more than about 40%, no more than about 50%, no more than about 60%, no more than about 70%, no more than about 80%, or no more than about 90% relative to the baseline ALT measurement. In some embodiments, the ALT measurement is decreased by 2.5%, 5%, 7.5%, 10%, 20%, 30%, 40%, 50%, 60%, 70%, 80%, or 90%, or by a range defined by any of the two aforementioned percentages.

[0306] In some embodiments, the measurement is a aspartate aminotransferase (AST) measurement. In some embodiments, the AST measurement is a AST concentration (for example, Units/L). In some embodiments, the AST measurement is a circulating AST measurement, for example, a blood, serum, or plasma AST measurement. In some embodiments, the AST measurement is obtained by an assay such as an immunoassay, a colorimetric assay, or a fluorescence assay. In some embodiments, the AST measurement is within a reference range. In some embodiments, the AST measurement is above the reference range. In some embodiments, the AST measurement is below the reference range.

[0307] In some embodiments, the composition reduces the AST measurement relative to the baseline AST measurement. In some embodiments, the reduced AST is measured in a second blood sample, plasma sample, or serum sample obtained from the subject after administering the composition to the subject. In some embodiments, the AST measurement is decreased by about 2.5% or more, about 5% or more, or about 7.5% or more, relative to the baseline AST measurement. In some embodiments, the AST measurement is decreased by about 10% or more, relative to the baseline AST measurement. In some embodiments, the AST measurement is decreased by about 20% or more, about 30% or more, about 40% or more, about 50% or more, about 60% or more, about 70% or more, about 80% or more, about 90% or more, relative to the baseline AST measurement. In some embodiments, the AST measurement is decreased by no more than about 2.5%, no more than about 5%, or no more than about 7.5%, relative to the baseline AST measurement. In some embodiments, the AST measurement is decreased by no more than about 10%, relative to the baseline AST measurement. In some embodiments, the AST measurement is decreased by no more than about 20%, no more than about 30%, no more than about 40%, no more than about 50%, no more than about 60%, no more than about 70%, no more than about 80%, no more than about 90% relative to the baseline AST measurement. In some embodiments, the AST measurement is decreased by 2.5%, 5%, 7.5%, 10%, 20%, 30%, 40%, 50%, 60%, 70%, 80%, or 90%, or by a range defined by any of the two aforementioned percentages.

[0308] In some embodiments, the measurement is a liver steatosis measurement. In some embodiments, the liver steatosis measurement is a liver fat percentage (LFP) measurement. In some embodiments, the measurement is a LFP measurement. In some embodiments, the LFP measurement is indicated as a mass/mass percentage of fat/total tissue. In some embodiments, the LFP measurement is indicated as a mass/volume percentage of fat/total tissue. In some embodiments, the LFP measurement is indicated as a volume/mass percentage of fat/total tissue. In some embodiments, the LFP measurement is indicated as a volume/volume percentage of fat/total tissue. In some embodiments, the LFP measurement is indicated as a score. In some embodiments, the LFP measurement is obtained noninvasively. In some embodiments, the LFP measurement is obtained by a medical imaging device. In some embodiments, the LFP measurement is obtained by a device such as a medical resonance imaging (MRI) device, a magnetic resonance spectroscopy device, a computed tomography device, a controlled attenuation parameter (CAP), a transient elastography device, or an ultrasound device. In some embodiments, the LFP measurement is obtained in a second liver sample. In some embodiments, the LFP measurement comprises a liver triglyceride measurement. In some embodiments, the LFP measurement is obtained by an assay such as an immunoassay, a colorimetric assay, or a fluorescence assay. In some embodiments, the LFP measurement or the LFP measurement is obtained using a scoring system upon a visual inspection of a sample such as a histological sample. In some embodiments, the LFP measurement or the LFP measurement is obtained using a stain with an affinity to fats, such as a lysochrome diazo dye.

[0309] In some embodiments, the composition reduces the LFP measurement relative to the baseline LFP measurement. In some embodiments, the reduced LFP is measured in a second liver sample obtained from the subject after administering the composition to the subject. In some embodiments, the reduced LFP is measured directly in the subject after administering the composition to the subject. In some embodiments, the LFP measurement is decreased by about 2.5% or more, about 5% or more, or about 7.5% or more, relative to the baseline LFP measurement. In some embodiments, the LFP measurement is decreased by about 10% or more, relative to the baseline LFP measurement. In some embodiments, the LFP measurement is decreased by about 20% or more, about 30% or more, about 40% or more, about 50% or more, about 60% or more, about 70% or more, about 80% or more, about 90% or more, relative to the baseline LFP measurement. In some embodiments, the LFP measurement is decreased by no more than about 2.5%, no more than about 5%, or no more than about 7.5%, relative to the baseline LFP measurement. In some embodiments, the LFP measurement is decreased by no more than about 10%, relative to the baseline LFP measurement. In some embodiments, the LFP measurement is decreased by no more than about 20%, no more than about 30%, no more than about 40%, no more than about 50%, no more than about 60%, no more than about 70%, no more than about 80%, or no more than about 90% relative to the baseline LFP measurement. In some embodiments, the LFP measurement is decreased by 2.5%, 5%, 7.5%, 10%, 20%, 30%, 40%, 50%, 60%, 70%, 80%, or 90%, or by a range defined by any of the two aforementioned percentages.

[0310] In some embodiments, the measurement is a liver fibrosis measurement. In some embodiments, the liver fibrosis measurement is a liver fibrosis score (LFS). In some embodiments, the LFS comprises a score of 0, 1, 2, 3, or 4, or a range of scores defined by any two of the aforementioned numbers. In some embodiments, the LFS comprises a score of 0-4. In some embodiments, the LFS is obtained using a scoring system exemplified in Table 4. In some embodiments, the LFS measurement is obtained noninvasively. In some embodiments, the LFS measurement is obtained by a medical imaging device such as a vibration-controlled transient elastography (VCTE) device, a shear wave elastography device, a medical resonance imaging (MRI) device, a magnetic resonance spectroscopy device, a computed tomography device, or an ultrasound device. In some embodiments, the LFS measurement is obtained in a second liver sample. In some embodiments, the LFS is obtained by an assay such as an immunoassay, a colorimetric assay, or a fluorescence assay. In some embodiments, the LFS is obtained using one or more indirect markers or measures of liver fibrosis such as an aspartate aminotransferase-to-platelet ratio index (APRI), a Fibrosis-4 (FIB-4) index, a FibroIndex, a Foms Index, a Hepascore, or a FibroTest. In some embodiments, the LFS is obtained using one or more indirect markers or measures of liver fibrosis such as a FIBROSpect test or a FIBROSpect II test. In some embodiments, the LFS is obtained by RT-qPCR or RNA sequencing of one or more fibrosis-related genes such as a collagen gene. In some embodiments, the LFS or the LFS is obtained using a scoring system upon a visual inspection of a sample such as a histological sample. In some embodiments, the LFS or the LFS is obtained using a stain with an affinity to collagen.

[0311] In some embodiments, the composition reduces the LFS relative to the baseline LFS. In some embodiments, the reduced LFS is measured in a second liver sample obtained from the subject after administering the composition to the subject. In some embodiments, the reduced LFS is measured directly in the subject after administering the composition to the subject. In some embodiments, the LFS is decreased by 1 relative to the baseline LFS. In some embodiments, the LFS is decreased by 2 relative to the baseline LFS. In some embodiments, the LFS is decreased by 3 relative to the baseline LFS. In some embodiments, the LFS is decreased by 4 relative to the baseline LFS. In some embodiments, the LFS is decreased by 1 or more, relative to the baseline LFS. In some embodiments, the LFS is decreased by 2 or more, relative to the baseline LFS. In some embodiments, the LFS is decreased by 3 more, relative to the baseline LFS. In some embodiments, the LFS is decreased by no more than 1, relative to the baseline LFS. In some embodiments, the LFS is decreased by no more than 2, relative to the baseline LFS. In some embodiments, the LFS is decreased by no more than 3, relative to the baseline LFS. In some embodiments, the LFS is decreased by no more than 4, relative to the baseline LFS. In some embodiments, the LFS is decreased by 1, 2, 3, or 4, or by a range defined by any of the two aforementioned numbers.

[0312] In some embodiments, the liver fibrosis measurement is a nonalcoholic fatty liver disease (NAFLD) fibrosis score. A NAFLD fibrosis score may take into account laboratory test values such as platelet count, albumin, and AST/ALT ratio, and patient characteristics such as BMI, and diabetes status. A NAFLD fibrosis score below −1.455 may be indicative of no fibrosis, mild fibrosis, or moderate fibrosis. A NAFLD fibrosis score between −1.455 and 0.675 may be indicative of severe fibrosis. A NAFLD fibrosis score above 0.675 may be indicative of cirrhosis.

[0313] In some embodiments, the composition reduces the NAFLD fibrosis score relative to the baseline NAFLD fibrosis score. In some embodiments, the NAFLD fibrosis score is decreased by about 2.5% or more, about 5% or more, or about 7.5% or more, relative to the baseline NAFLD fibrosis score. In some embodiments, the NAFLD fibrosis score is decreased by about 10% or more, relative to the baseline NAFLD fibrosis score. In some embodiments, the NAFLD fibrosis score is decreased by about 20% or more, about 30% or more, about 40% or more, about 50% or more, about 60% or more, about 70% or more, about 80% or more, about 90% or more, relative to the baseline NAFLD fibrosis score. In some embodiments, the NAFLD fibrosis score is decreased by no more than about 2.5%, no more than about 5%, or no more than about 7.5%, relative to the baseline NAFLD fibrosis score. In some embodiments, the NAFLD fibrosis score is decreased by no more than about 10%, relative to the baseline NAFLD fibrosis score. In some embodiments, the NAFLD fibrosis score is decreased by no more than about 20%, no more than about 30%, no more than about 40%, no more than about 50%, no more than about 60%, no more than about 70%, no more than about 80%, no more than about 90%, or no more than about 100% relative to the baseline NAFLD fibrosis score. In some embodiments, the NAFLD fibrosis score is decreased by 2.5%, 5%, 7.5%, 10%, 20%, 30%, 40%, 50%, 60%, 70%, 80%, 90%, or 100%, or by a range defined by any of the two aforementioned percentages.

[0314] In some embodiments, the measurement is a non-alcoholic fatty liver disease (NAFLD) activity score. In some embodiments, the NAFLD activity score comprises a numerical value such as a number of points. In some embodiments, the numerical value is 0, 1, 2, 3, 4, 5, 6, 7, or 8, or a range defined by any two of the aforementioned numerical values. In some embodiments, the numerical value is 0-8. In some embodiments, the NAFLD activity score comprises a steatosis grade such as a liver fat percentage. In some embodiments, a steatosis grade <5% comprises 0 points in the NAFLD activity score. In some embodiments, a steatosis grade of 5-33% comprises 1 point in the NAFLD activity score. In some embodiments, a steatosis grade of 34-66% comprises 2 points in the NAFLD activity score. In some embodiments, a steatosis grade of >66% comprises 3 points in the NAFLD activity score. In some embodiments, the NAFLD activity score comprises a lobular inflammation grade. In some embodiments, the lobular inflammation grade comprises an assessment of inflammatory foci. In some embodiments, a lobular inflammation grade comprising 0 foci comprises 0 points in the NAFLD activity score. In some embodiments, a lobular inflammation grade comprising 1 focus per a field (such as a 20× field or a 200× field) comprises 1 point in the NAFLD activity score. In some embodiments, a lobular inflammation grade comprising 2-4 foci per field comprises 2 points in the NAFLD activity score. In some embodiments, a lobular inflammation grade comprising >4 foci per field comprises 3 points in the NAFLD activity score. In some embodiments, the NAFLD activity score comprises a liver cell injury grade such as an amount of ballooning cells. In some embodiments, a liver cell injury comprising no ballooning cells comprises 0 points in the NAFLD activity score. In some embodiments, a liver cell injury comprising some new balloon cells comprises 1 point in the NAFLD activity score. In some embodiments, a liver cell injury comprising many ballooning cells or prominent ballooning comprises 2 points in the NAFLD activity score. In some embodiments, the NAFLD activity score is obtained invasively, based on histology, and/or in a liver biopsy.

[0315] In some embodiments, the composition reduces the NAFLD activity score relative to the baseline NAFLD activity score. In some embodiments, the reduced NAFLD activity score is measured in a second liver sample obtained from the subject after administering the composition to the subject. In some embodiments, the NAFLD activity score is decreased by 1 relative to the baseline NAFLD activity score. In some embodiments, the NAFLD activity score is decreased by 2 relative to the baseline NAFLD activity score. In some embodiments, the NAFLD activity score is decreased by 3 relative to the baseline NAFLD activity score. In some embodiments, the NAFLD activity score is decreased by 4 relative to the baseline NAFLD activity score. In some embodiments, the NAFLD activity score is decreased by 5 relative to the baseline NAFLD activity score. In some embodiments, the NAFLD activity score is decreased by 6 relative to the baseline NAFLD activity score. In some embodiments, the NAFLD activity score is decreased by 7 relative to the baseline NAFLD activity score. In some embodiments, the NAFLD activity score is decreased by 8 relative to the baseline NAFLD activity score. In some embodiments, the NAFLD activity score is decreased by 1 or more, relative to the baseline NAFLD activity score. In some embodiments, the NAFLD activity score is decreased by 2 or more, 3 or more, 4 or more, 5 or more, 6 or more, 7 or more, or 8 or more, relative to the baseline NAFLD activity score. In some embodiments, the NAFLD activity score is decreased by no more than 1, no more than 2, no more than 3, no more than 4, no more than 5, no more than 6, no more than 7, or no more than 8, relative to the baseline NAFLD activity score. In some embodiments, the NAFLD activity score is decreased by 1, 2, 3, 4, 5, 6, 7, or 8, or by a range defined by any of the two aforementioned numbers.

[0316] In some embodiments, the measurement is a gamma-glutamyl transferase (GGT) measurement. In some embodiments, the GGT measurement is a GGT concentration. In some embodiments, the GGT measurement is a blood GGT measurement. In some embodiments, the GGT measurement is obtained by an assay such as an immunoassay, a colorimetric assay, a chromatography assay, or a fluorescence assay.

[0317] In some embodiments, the composition reduces the GGT measurement relative to the baseline GGT measurement. In some embodiments, the reduced GGT is measured in a second blood sample, plasma sample, or serum sample obtained from the subject after administering the composition to the subject. In some embodiments, the GGT measurement is decreased by about 2.5% or more, about 5% or more, or about 7.5% or more, relative to the baseline GGT measurement. In some embodiments, the GGT measurement is decreased by about 10% or more, relative to the baseline GGT measurement. In some embodiments, the GGT measurement is decreased by about 20% or more, about 30% or more, about 40% or more, about 50% or more, about 60% or more, about 70% or more, about 80% or more, about 90% or more, relative to the baseline GGT measurement. In some embodiments, the GGT measurement is decreased by no more than about 2.5%, no more than about 5%, or no more than about 7.5%, relative to the baseline GGT measurement. In some embodiments, the GGT measurement is decreased by no more than about 10%, relative to the baseline GGT measurement. In some embodiments, the GGT measurement is decreased by no more than about 20%, no more than about 30%, no more than about 40%, no more than about 50%, no more than about 60%, no more than about 70%, no more than about 80%, no more than about 90%, or no more than about 100% relative to the baseline GGT measurement. In some embodiments, the GGT measurement is decreased by 2.5%, 5%, 7.5%, 10%, 20%, 30%, 40%, 50%, 60%, 70%, 80%, 90%, or 100%, or by a range defined by any of the two aforementioned percentages.

[0318] In some embodiments, the measurement is a hair count. In some embodiments, the hair count is a total hair count. The total hair count may include a vellus hair count and a non-vellus hair count. In some embodiments, the hair count is a vellus hair count. In some embodiments, the hair count is a non-vellus hair count. In some embodiments, the hair count is determined in an area of skin. In some embodiments, the hair count is normalized based on the area of skin. In some embodiments, the hair count is assessed using photography. In some embodiments, the hair count is assessed by phototrichogram. In some embodiments, the hair count is assessed by a macrophotography analysis.

[0319] In some embodiments, the composition increases the hair count relative to the baseline hair count. In some embodiments, the increase is measured in the subject after administering the composition to the subject. In some embodiments, the increase is measured directly on the subject after administering the composition to the subject. In some embodiments, the hair count is increased by about 2.5% or more, about 50% or more, or about 7.5% or more, relative to the baseline hair count. In some embodiments, the hair count is increased by about 10% or more, relative to the baseline hair count. In some embodiments, the hair count is increased by about 20% or more, about 30% or more, about 40% or more, about 50% or more, about 60% or more, about 70% or more, about 80% or more, about 90% or more, relative to the baseline hair count. In some embodiments, the hair count is increased by about 100% or more, increased by about 250% or more, increased by about 500% or more, increased by about 750% or more, or increased by about 1000% or more, relative to the baseline hair count. In some embodiments, the hair count is increased by no more than about 2.5%, no more than about 5%, or no more than about 7.5%, relative to the baseline hair count. In some embodiments, the hair count is increased by no more than about 10%, relative to the baseline hair count. In some embodiments, the hair count is increased by no more than about 20%, no more than about 30%, no more than about 40%, no more than about 50%, no more than about 60%, no more than about 70%, no more than about 80%, no more than about 90%, or no more than about 100% relative to the baseline hair count. In some embodiments, the hair count is increased by no more than about 100%, increased by no more than about 250%, increased by no more than about 500%, increased by no more than about 750%, or increased by no more than about 1000%, relative to the baseline hair count. In some embodiments, the hair count is increased by 2.5%, 5%, 7.5%, 10%, 20%, 30%, 40%, 50%, 60%, 70%, 80%, 90%, 100%, 250%, 500%, 750%, or 1000%, or by a range defined by any of the two aforementioned percentages.

[0320] In some embodiments, the measurement is a hair thickness measurement. In some embodiments, the hair thickness measurement is determined in an area of skin. In some embodiments, the hair thickness measurement comprises a width of an individual hair. In some embodiments, the hair thickness measurement comprises widths of multiple individual hairs. In some embodiments, the hair thickness measurement comprises an average of the widths of the multiple individual hairs. In some embodiments, the hair thickness measurement comprises a median of the widths of the multiple individual hairs. The hair thickness measurement may include a vellus hair thickness measurement. The hair thickness measurement may include a non-vellus hair thickness measurement. In some embodiments, the hair thickness measurement is assessed using photography. In some embodiments, the hair thickness measurement is assessed by phototrichogram. In some embodiments, the hair thickness measurement is assessed by a macrophotography analysis.

[0321] In some embodiments, the composition increases the hair thickness measurement relative to the baseline hair thickness measurement. In some embodiments, the increase is measured in a second tissue sample (e.g. a skin sample as described herein) obtained from the subject after administering the composition to the subject. In some embodiments, the increase is measured directly on the subject after administering the composition to the subject. In some embodiments, the hair thickness measurement is increased by about 2.5% or more, about 5% or more, or about 7.5% or more, relative to the baseline hair thickness measurement. In some embodiments, the hair thickness measurement is increased by about 10% or more, relative to the baseline hair thickness measurement. In some embodiments, the hair thickness measurement is increased by about 20% or more, about 30% or more, about 40% or more, about 50% or more, about 60% or more, about 70% or more, about 80% or more, about 90% or more, relative to the baseline hair thickness measurement. In some embodiments, the hair thickness measurement is increased by about 100% or more, increased by about 250% or more, increased by about 500% or more, increased by about 750% or more, or increased by about 1000% or more, relative to the baseline hair thickness measurement. In some embodiments, the hair thickness measurement is increased by no more than about 2.5%, no more than about 5%, or no more than about 7.5%, relative to the baseline hair thickness measurement. In some embodiments, the hair thickness measurement is increased by no more than about 10%, relative to the baseline hair thickness measurement. In some embodiments, the hair thickness measurement is increased by no more than about 20%, no more than about 30%, no more than about 40%, no more than about 50%, no more than about 60%, no more than about 70%, no more than about 80%, no more than about 90%, or no more than about 100% relative to the baseline hair thickness measurement. In some embodiments, the hair thickness measurement is increased by no more than about 100%, increased by no more than about 250%, increased by no more than about 500%, increased by no more than about 750%, or increased by no more than about 1000%, relative to the baseline hair thickness measurement. In some embodiments, the hair thickness measurement is increased by 2.5%, 5%, 7.5%, 10%, 20%, 30%, 40%, 50%, 60%, 70%, 80%, 90%, 100%, 250%, 500%, 750%, or 1000%, or by a range defined by any of the two aforementioned percentages.

[0322] In some embodiments, the measurement is a hair density measurement. In some embodiments, the hair density measurement is determined in an area of skin. In some embodiments, the hair density measurement comprises a number of hair in the area of skin. In some embodiments, the hair density measurement comprises the number of hair in the area of skin divided by the area of skin. The hair density measurement may include a vellus hair density measurement. The hair density measurement may include a non-vellus hair density measurement. In some embodiments, the hair density measurement is assessed using photography. In some embodiments, the hair density measurement is assessed by phototrichogram. In some embodiments, the hair density measurement is assessed by a macrophotography analysis.

[0323] In some embodiments, the composition increases the hair density measurement relative to the baseline hair density measurement. In some embodiments, the increase is measured in a second tissue sample (e.g. a skin sample as described herein) obtained from the subject after administering the composition to the subject. In some embodiments, the increase is measured directly on the subject after administering the composition to the subject. In some embodiments, the hair density measurement is increased by about 2.5% or more, about 5% or more, or about 7.5% or more, relative to the baseline hair density measurement. In some embodiments, the hair density measurement is increased by about 10% or more, relative to the baseline hair density measurement. In some embodiments, the hair density measurement is increased by about 20% or more, about 30% or more, about 40% or more, about 50% or more, about 60% or more, about 70% or more, about 80% or more, about 90% or more, relative to the baseline hair density measurement. In some embodiments, the hair density measurement is increased by about 100% or more, increased by about 250% or more, increased by about 500% or more, increased by about 750% or more, or increased by about 1000% or more, relative to the baseline hair density measurement. In some embodiments, the hair density measurement is increased by no more than about 2.5%, no more than about 5%, or no more than about 7.5%, relative to the baseline hair density measurement. In some embodiments, the hair density measurement is increased by no more than about 10%, relative to the baseline hair density measurement. In some embodiments, the hair density measurement is increased by no more than about 20%, no more than about 30%, no more than about 40%, no more than about 50%, no more than about 60%, no more than about 70%, no more than about 80%, no more than about 90%, or no more than about 100% relative to the baseline hair density measurement. In some embodiments, the hair density measurement is increased by no more than about 100%, increased by no more than about 250%, increased by no more than about 500%, increased by no more than about 750%, or increased by no more than about 1000%, relative to the baseline hair density measurement. In some embodiments, the hair density measurement is increased by 2.5%, 5%, 7.5%, 10%, 20%, 30%, 40%, 50%, 60%, 70%, 80%, 90%, 100%, 250%, 500%, 750%, or 1000%, or by a range defined by any of the two aforementioned percentages.

[0324] In some embodiments, the measurement is a SOS2 protein measurement. In some embodiments, the SOS2 protein measurement comprises a SOS2 protein level. In some embodiments, the SOS2 protein level is indicated as a mass or percentage of SOS2 protein per sample weight. In some embodiments, the SOS2 protein level is indicated as a mass or percentage of SOS2 protein per sample volume. In some embodiments, the SOS2 protein level is indicated as a mass or percentage of SOS2 protein per total protein within the sample. In some embodiments, the SOS2 protein measurement is a tissue SOS2 protein measurement. Examples of tissue SOS2 protein measurements include a liver SOS2 protein measurement, a kidney SOS2 protein measurement, a eye SOS2 protein measurement, or a adipose tissue SOS2 protein measurement. In some embodiments, the SOS2 protein measurement is a circulating SOS2 protein measurement. In some embodiments, the SOS2 protein measurement is obtained by an assay such as an immunoassay, a colorimetric assay, or a fluorescence assay.

[0325] In some embodiments, the composition reduces the SOS2 protein measurement relative to the baseline SOS2 protein measurement. In some embodiments, the reduction is measured in a second sample (e.g. a tissue sample such as liver, kidney, adipose, or eye tissue) obtained from the subject after administering the composition to the subject. In some embodiments, the SOS2 protein measurement is decreased by about 2.5% or more, about 5% or more, or about 7.5% or more, relative to the baseline SOS2 protein measurement. In some embodiments, the SOS2 protein measurement is decreased by about 10% or more, relative to the baseline SOS2 protein measurement. In some embodiments, the SOS2 protein measurement is decreased by about 20% or more, about 30% or more, about 40% or more, about 50% or more, about 60% or more, about 70% or more, about 80% or more, about 90% or more, relative to the baseline SOS2 protein measurement. In some embodiments, the SOS2 protein measurement is decreased by no more than about 2.5%, no more than about 5%, or no more than about 7.5%, relative to the baseline SOS2 protein measurement. In some embodiments, the SOS2 protein measurement is decreased by no more than about 10%, relative to the baseline SOS2 protein measurement. In some embodiments, the SOS2 protein measurement is decreased by no more than about 20%, no more than about 30%, no more than about 40%, no more than about 50%, no more than about 60%, no more than about 70%, no more than about 80%, or no more than about 90% relative to the baseline SOS2 protein measurement. In some embodiments, the SOS2 protein measurement is decreased by 2.5%, 5%, 7.5%, 10%, 20%, 30%, 40%, 50%, 60%, 70%, 80%, or 90%, or by a range defined by any of the two aforementioned percentages.

[0326] In some embodiments, the measurement is a SOS2 mRNA measurement. In some embodiments, the SOS2 mRNA measurement comprises a SOS2 mRNA level. In some embodiments, the SOS2 mRNA level is indicated as a mass or percentage of SOS2 mRNA per sample weight. In some embodiments, the SOS2 mRNA level is indicated as a mass or percentage of SOS2 mRNA per sample volume. In some embodiments, the SOS2 mRNA level is indicated as a mass or percentage of SOS2 mRNA per total mRNA within the sample. In some embodiments, the SOS2 mRNA level is indicated as a mass or percentage of SOS2 mRNA per total nucleic acids within the sample. In some embodiments, the SOS2 mRNA level is indicated relative to another mRNA level, such as an mRNA level of a housekeeping gene, within the sample. In some embodiments, the SOS2 mRNA measurement is a tissue SOS2 mRNA measurement. Examples of tissue SOS2 mRNA measurements include a liver SOS2 mRNA measurement, a kidney SOS2 mRNA measurement, a eye SOS2 mRNA measurement, or a adipose tissue SOS2 mRNA measurement. In some embodiments, the SOS2 mRNA measurement is a circulating SOS2 mRNA measurement. In some embodiments, the SOS2 mRNA measurement is obtained by an assay such as a polymerase chain reaction (PCR) assay. In some embodiments, the PCR comprises quantitative PCR (qPCR). In some embodiments, the PCR comprises reverse transcription of the SOS2 mRNA.

[0327] In some embodiments, the composition reduces the SOS2 mRNA measurement relative to the baseline SOS2 mRNA measurement. In some embodiments, the reduction is measured in a second sample (e.g. a tissue sample such as liver, kidney, adipose, or eye tissue) obtained from the subject after administering the composition to the subject. The second sample may comprise or consist of hepatocytes. The sample may comprise or consist of podocytes. In some embodiments, the SOS2 mRNA measurement is decreased by about 2.5% or more, about 5% or more, or about 7.5% or more, relative to the baseline SOS2 mRNA measurement. In some embodiments, the SOS2 mRNA measurement is decreased by about 10% or more, relative to the baseline SOS2 mRNA measurement. In some embodiments, the SOS2 mRNA measurement is decreased by about 20% or more, about 30% or more, about 40% or more, about 50% or more, about 60% or more, about 70% or more, about 80% or more, about 90% or more, relative to the baseline SOS2 mRNA measurement. In some embodiments, the SOS2 mRNA measurement is decreased by no more than about 2.5%, no more than about 5%, or no more than about 7.5%, relative to the baseline SOS2 mRNA measurement. In some embodiments, the SOS2 mRNA measurement is decreased by no more than about 10%, relative to the baseline SOS2 mRNA measurement. In some embodiments, the SOS2 mRNA measurement is decreased by no more than about 20%, no more than about 30%, no more than about 40%, no more than about 50%, no more than about 60%, no more than about 70%, no more than about 80%, or no more than about 90% relative to the baseline SOS2 mRNA measurement. In some embodiments, the SOS2 mRNA measurement is decreased by 2.5%, 5%, 7.5%, 10%, 20%, 30%, 40%, 50%, 60%, 70%, 80%, or 90%, or by a range defined by any of the two aforementioned percentages.

### III. DEFINITIONS

[0328] Unless defined otherwise, all terms of art, notations and other technical and scientific terms or terminology used herein are intended to have the same meaning as is commonly understood by one of ordinary skill in the art to which the claimed subject matter pertains. In some cases, terms with commonly understood meanings are defined herein for clarity and/or for ready reference, and the inclusion of such definitions herein should not necessarily be construed to represent a substantial difference over what is generally understood in the art.

[0329] Throughout this application, various embodiments may be presented in a range format. It should be understood that the description in range format is merely for convenience and brevity and should not be construed as an inflexible limitation on the scope of the disclosure. Accordingly, the description of a range should be considered to have specifically disclosed all the possible subranges as well as individual numerical values within that range. For example, description of a range such as from 1 to 6 should be considered to have specifically disclosed subranges such as from 1 to 3, from 1 to 4, from 1 to 5, from 2 to 4, from 2 to 6, from 3 to 6 etc., as well as individual numbers within that range, for example, 1, 2, 3, 4, 5, and 6. This applies regardless of the breadth of the range.

[0330] As used in the specification and claims, the singular forms “a”, “an” and “the” include plural references unless the context clearly dictates otherwise. For example, the term “a sample” includes a plurality of samples, including mixtures thereof.

[0331] The terms “determining,” “measuring,” “evaluating,” “assessing,” “assaying,” and “analyzing” are often used interchangeably herein to refer to forms of measurement. The terms include determining if an element is present or not (for example, detection). These terms can include quantitative, qualitative or quantitative and qualitative determinations. Assessing can be relative or absolute. “Detecting the presence of” can include determining the amount of something present in addition to determining whether it is present or absent depending on the context.

[0332] The terms “subject,” and “patient” may be used interchangeably herein. A “subject” can be a biological entity containing expressed genetic materials. The biological entity can be a plant, animal, or microorganism, including, for example, bacteria, viruses, fungi, and protozoa. The subject can be a mammal. The mammal can be a human. The subject may be diagnosed or suspected of being at high risk for a disease. In some cases, the subject is not necessarily diagnosed or suspected of being at high risk for the disease.

[0333] As used herein, the term “about” a number refers to that number plus or minus 10% of that number. The term “about” a range refers to that range minus 10% of its lowest value and plus 10% of its greatest value.

[0334] As used herein, the terms “treatment” or “treating” are used in reference to a pharmaceutical or other intervention regimen for obtaining beneficial or desired results in the recipient. Beneficial or desired results include but are not limited to a therapeutic benefit and/or a prophylactic benefit. A therapeutic benefit may refer to eradication or amelioration of symptoms or of an underlying disorder being treated. Also, a therapeutic benefit can be achieved with the eradication or amelioration of one or more of the physiological symptoms associated with the underlying disorder such that an improvement is observed in the subject, notwithstanding that the subject may still be afflicted with the underlying disorder. A prophylactic effect includes delaying, preventing, or eliminating the appearance of a disease or condition, delaying or eliminating the onset of symptoms of a disease or condition, slowing, halting, or reversing the progression of a disease or condition, or any combination thereof. For prophylactic benefit, a subject at risk of developing a particular disease, or to a subject reporting one or more of the physiological symptoms of a disease may undergo treatment, even though a diagnosis of this disease may not have been made.

[0335] In some embodiments, the term “mRNA” means the presently known mRNA transcript(s) of a targeted gene, and any further transcripts which may be elucidated.

[0336] In some embodiments, “dsRNA”, “siRNA”, and “siRNA agent” are used interchangeably as agents that can mediate silencing of a target RNA, e.g., mRNA, e.g., a transcript of a gene that encodes a protein. In some cases, the target RNA is SOS. Such mRNA may also be referred to herein as mRNA to be silenced. Such a gene is also referred to as a target gene. In some cases, the RNA to be silenced is an endogenous gene or a pathogen gene. In addition, RNAs other than mRNA, e.g., tRNAs, and viral RNAs, can also be targeted.

[0337] In some embodiments, the phrase “mediates RNAi” refers to the ability to silence, in a sequence specific manner, a target RNA. While not wishing to be bound by theory, it is believed that silencing uses the RNAi machinery or process and a guide RNA, e.g., an siRNA agent.

[0338] In some embodiments, “specifically hybridizable” and “complementary” are terms which are used to indicate a sufficient degree of complementarity such that stable and specific binding occurs between a compound described herein and a target RNA molecule.

[0339] Specific binding may require a sufficient degree of complementarity to avoid non-specific binding of the oligomeric compound to non-target sequences under conditions in which specific binding is desired, i.e., under physiological conditions in the case of assays or therapeutic treatment, or in the case of in vitro assays, under conditions in which the assays are performed. The non-target sequences may differ by at least 5 nucleotides.

[0340] In some embodiments, a dsRNA agent is “sufficiently complementary” to a target RNA, e.g., a target mRNA, such that the dsRNA agent silences production of protein encoded by the target mRNA. In some embodiments, the dsRNA agent is “exactly complementary” to a target RNA, e.g., the target RNA and the dsRNA duplex agent anneal, for example to form a hybrid made exclusively of Watson-Crick base pairs in the region of exact complementarity. A “sufficiently complementary” target RNA can include an internal region (e.g., of at least 10 nucleotides) that is exactly complementary to a target RNA. Moreover, in some embodiments, the dsRNA agent specifically discriminates a single-nucleotide difference. In this case, the dsRNA agent only mediates RNAi if exact complementary is found in the region (e.g., within 7 nucleotides of) the single-nucleotide difference.

[0341] In some embodiments, the term “oligonucleotide” refers to a nucleic acid molecule (RNA or DNA) for example of length less than 100, 200, 300, or 400 nucleotides.

[0342] In some embodiments, the term “oligonucleotide” refers to an oligomer or polymer of ribonucleic acid (RNA) or deoxyribonucleic acid (DNA) or mimetics thereof. The term “oligonucleotide”, also includes linear or circular oligomers of natural and/or modified monomers or linkages, including deoxyribonucleosides, ribonucleosides, substituted and alpha-anomeric forms thereof, peptide nucleic acids (PNA), locked nucleic acids (LNA), phosphorothioate, methylphosphonate, and the like. Oligonucleotides are capable of specifically binding to a target polynucleotide by way of a regular pattern of monomer-to-monomer interactions, such as Watson-Crick type of base pairing, Hoogsteen or reverse Hoogsteen types of base pairing, or the like.

[0343] In some embodiments, the oligonucleotide is “chimeric”, that is, composed of different regions. “Chimeric” oligonucleotides contain two or more chemical regions, for example, DNA region(s), RNA region(s), PNA region(s), etc. Each chemical region is made up of at least one monomer unit, i.e., a nucleotide in the case of an oligonucleotides compound. These oligonucleotides typically comprise at least one region wherein the oligonucleotide is modified in order to exhibit one or more desired properties. The desired properties of the oligonucleotide include, but are not limited, for example, to increased resistance to nuclease degradation, increased cellular uptake, and/or increased binding affinity for the target nucleic acid. Different regions of the oligonucleotide may therefore have different properties. Chimeric oligonucleotides can be formed as mixed structures of two or more oligonucleotides, modified oligonucleotides, oligonucleosides and/or oligonucleotide analogs.

[0344] The oligonucleotide can comprise or be composed of regions that can be linked in “register”, that is, when the monomers are linked consecutively, as in native DNA, or linked via spacers. The spacers are intended to constitute a covalent “bridge” between the regions and have, in some cases, a length not exceeding about 100 carbon atoms. The spacers may carry different functionalities, for example, having positive or negative charge, carry special nucleic acid binding properties (intercalators, groove binders, toxins, fluorophores etc.), being lipophilic, inducing special secondary structures like, for example, alanine containing peptides that induce alpha-helices.

[0345] In some embodiments, “oligonucleotide specific for” or “oligonucleotide which targets” refers to an oligonucleotide having a sequence (i) capable of forming a stable complex with a portion of the targeted gene, or (ii) capable of forming a stable duplex with a portion of a mRNA transcript of the targeted gene. Stability of the complexes and duplexes can be determined by theoretical calculations and/or in vitro assays.

[0346] In some embodiments, the term “target nucleic acid” encompasses DNA, RNA (including pre-mRNA and mRNA) transcribed from such DNA, and also cDNA derived from such RNA, coding, noncoding sequences, sense and antisense polynucleotides. The specific hybridization of an oligomeric compound with its target nucleic acid interferes with the normal function of the nucleic acid. This modulation of function of a target nucleic acid by compounds, which specifically hybridize to it, is generally referred to as “antisense”. The functions of DNA that are modulated include, for example, replication and transcription. The functions of RNA that are modulated, include all vital functions such as, for example, translocation of the RNA to the site of protein translation, translation of protein from the RNA, splicing of the RNA to yield one or more mRNA species, and catalytic activity which may be engaged in or facilitated by the RNA. The overall effect of such interference with target nucleic acid function is modulation of the expression of an encoded product or oligonucleotides.

[0347] RNA interference “RNAi” is mediated by double stranded RNA (dsRNA) molecules that have sequence-specific homology to their “target” nucleic acid sequences. In certain embodiments, the mediators are 5-25 nucleotide “small interfering” RNA duplexes (siRNAs). The siRNAs are derived from the processing of dsRNA by an RNase enzyme known as Dicer. siRNA duplex products are recruited into a multi-protein siRNA complex termed RISC (RNA Induced Silencing Complex). Without wishing to be bound by any particular theory, a RISC is then believed to be guided to a target nucleic acid (suitably mRNA), where the siRNA duplex interacts in a sequence-specific way to mediate cleavage in a catalytic fashion. Small interfering RNAs can be synthesized and used. Small interfering RNAs for use in the methods herein suitably comprise between about 1 to about 50 nucleotides (nt). In examples of non-limiting embodiments, siRNAs can comprise about 5 to about 40 nt, about 5 to about 30 nt, about 10 to about 30 nt, about 15 to about 25 nt, or about 20-25 nucleotides.

[0348] In some embodiments, selection of appropriate oligonucleotides is facilitated by using computer programs that automatically align nucleic acid sequences and indicate regions of identity or homology. Such programs are used to compare nucleic acid sequences obtained, for example, by searching databases such as GenBank or by sequencing PCR products. Comparison of nucleic acid sequences from a range of species allows the selection of nucleic acid sequences that display an appropriate degree of identity between species. In the case of genes that have not been sequenced, Southern blots are performed to allow a determination of the degree of identity between genes in target species and other species. By performing Southern blots at varying degrees of stringency, as is well known in the art, it is possible to obtain an approximate measure of identity. These procedures allow the selection of oligonucleotides that exhibit a high degree of complementarity to target nucleic acid sequences in a subject to be controlled and a lower degree of complementarity to corresponding nucleic acid sequences in other species. One skilled in the art will realize that there is considerable latitude in selecting appropriate regions of genes.

[0349] In some embodiments, “enzymatic RNA” is meant as an RNA molecule with enzymatic activity. Enzymatic nucleic acids (ribozymes) act by first binding to a target RNA. Such binding occurs through the target binding portion of an enzymatic nucleic acid which is held in close proximity to an enzymatic portion of the molecule that acts to cleave the target RNA. Thus, the enzymatic nucleic acid first recognizes and then binds a target RNA through base pairing, and once bound to the correct site, acts enzymatically to cut the target RNA.

[0350] In some embodiments, “decoy RNA” is meant as an RNA molecule that mimics the natural binding domain for a ligand. The decoy RNA therefore competes with natural binding targets for the binding of a specific ligand. For example, over-expression of HIV trans-activation response (TAR) RNA can act as a “decoy” and efficiently binds HIV tat protein, thereby preventing it from binding to TAR sequences encoded in the HIV RNA. This is meant to be a specific example. Those in the art will recognize that this is but one example, and some embodiments can be readily generated using techniques generally known in the art.

[0351] In some embodiments, “monomers” typically indicate monomers linked by phosphodiester bonds or analogs thereof to form oligonucleotides ranging in size from a few monomeric units, e.g., from about 3-4, to about several hundreds of monomeric units. Analogs of phosphodiester linkages include: phosphorothioate, phosphorodithioate, methylphosphornates, phosphoroselenoate, phosphoramidate, and the like, as more fully described below.

[0352] In some embodiments, “nucleotide” covers naturally occurring nucleotides as well as non-naturally occurring nucleotides. It should be clear to the person skilled in the art that various nucleotides which previously have been considered “non-naturally occurring” have subsequently been found in nature. Thus, “nucleotides” includes not only the known purine and pyrimidine heterocycles-containing molecules, but also heterocyclic analogues and tautomers thereof. Illustrative examples of other types of nucleotides are molecules containing adenine, guanine, thymine, cytosine, uracil, purine, xanthine, \hat{ }aminopurine, 8-oxo-N6-memyladenine, 7-deazaxanthine, 7-deazaguanine, N4,N4-ethanocytosin, N6,N6-ethano-2,6-diaminopurine, 5-methylcytosine, 5-(C3-C6)-alkynylcytosine, 5-fluorouracil, 5-bromouracil, pseudoisocytosine, 2-hydroxy-5-memyl-4-triazolopvridin, isocytosine, isoguanin, inosine and the “non-naturally occurring” nucleotides described in Benner et al., U.S. Pat. No. 5,432,272. The term “nucleotide” is intended to cover every and all of these examples as well as analogues and tautomers thereof. Especially interesting nucleotides are those containing adenine, guanine, thymine, cytosine, and uracil, which are considered as the naturally occurring nucleotides in relation to therapeutic and diagnostic application in humans. Nucleotides include the natural 2′-deoxy and 2-hydroxyl sugars, as well as their analogs.

[0353] In some embodiments, “analogs” in reference to nucleotides includes synthetic nucleotides having modified base moieties and/or modified sugar moieties. Such analogs include synthetic nucleotides designed to enhance binding properties, e.g., duplex or triplex stability, specificity, or the like.

[0354] In some embodiments, “hybridization” means the pairing of at least substantially complementary strands of oligomeric compounds. One mechanism of pairing involves hydrogen bonding, which may be Watson-Crick, Hoogsteen or reversed Hoogsteen hydrogen bonding, between complementary nucleoside or nucleotide bases (nucleotides) of the strands of oligomeric compounds. For example, adenine and thymine are complementary nucleotides which pair through the formation of hydrogen bonds. Hybridization can occur under varying circumstances.

[0355] In some embodiments, a compound of the disclosure is “specifically hybridizable” when binding of the compound to the target nucleic acid interferes with the normal function of the target nucleic acid to cause a modulation of function and/or activity, and there is a sufficient degree of complementarity to avoid non-specific binding of the compound to non-target nucleic acid sequences under conditions in which specific binding is desired, i.e., under physiological conditions in the case of in vivo assays or therapeutic treatment, and under conditions in which assays are performed in the case of in vitro assays.

[0356] In some embodiments, “stringent hybridization conditions” or “stringent conditions” refers to conditions under which a compound will hybridize to its target sequence, but to a minimal number of other sequences. Stringent conditions are sequence-dependent and will be different in different circumstances and “stringent conditions” under which oligomeric compounds hybridize to a target sequence are determined by the nature and composition of the oligomeric compounds and the assays in which they are being investigated. In some cases, stringent hybridization conditions comprise low concentrations (<0.15M) of salts with inorganic cations such as Na+ or K+ (i.e., low ionic strength), temperature higher than about 20° C. to 25° C. and below the Tm of the oligomeric compound/target sequence complex, and the presence of denaturants such as formamide, dimethylformamide, dimethyl sulfoxide, or the detergent sodium dodecyl sulfate (SDS). For example, the hybridization rate decreases 1.1% for each 1% formamide. An example of a high stringency hybridization condition is 0.1× sodium chloride-sodium citrate buffer (SSC)/0.1% (w/v) SDS at 60° C. for 30 minutes.

[0357] In some embodiments, “complementary” refers to the capacity for precise pairing between two nucleotides on one or two oligomeric strands. For example, if a nucleobase at a certain position of a compound is capable of hydrogen bonding with a nucleobase at a certain position of a target nucleic acid, said target nucleic acid being a DNA, RNA, or oligonucleotide molecule, then the position of hydrogen bonding between the oligonucleotide and the target nucleic acid may be considered to be a complementary position. The oligomeric compound and the further DNA, RNA, or oligonucleotide molecule are complementary to each other when a sufficient number of complementary positions in each molecule are occupied by nucleotides which can hydrogen bond with each other. Thus, “specifically hybridizable” and “complementary” are terms which may be used to indicate a sufficient degree of precise pairing or complementarity over a sufficient number of nucleotides such that stable and specific binding occurs between the oligomeric compound and a target nucleic acid.

[0358] The sequence of an oligomeric compound need not be 100% complementary to that of its target nucleic acid to be specifically hybridizable. Moreover, an oligonucleotide may hybridize over one or more segments such that intervening or adjacent segments are not involved in the hybridization event (e.g., a loop structure, mismatch or hairpin structure). In some embodiments, oligomeric compounds disclosed herein comprise at least about 70%, or at least about 75%, or at least about 80%, or at least about 85%, or at least about 90%, or at least about 95%, or at least about 99% sequence complementarity to a target region within the target nucleic acid sequence to which they are targeted. For example, a compound in which 18 of 20 nucleotides of the compound are complementary to a target region, and would therefore specifically hybridize, would represent 90 percent complementarity. In this example, the remaining noncomplementary nucleotides may be clustered or interspersed with complementary nucleotides and need not be contiguous to each other or to complementary nucleotides. As such, a compound which is 18 nucleotides in length having 4 (four) noncomplementary nucleotides which are flanked by two regions of complete complementarity with the target nucleic acid would have 77.8% overall complementarity with the target nucleic acid and would thus fall within the scope of the present disclosure. Percent complementarity of a compound with a region of a target nucleic acid can be determined routinely using BLAST programs (basic local alignment search tools) and PowerBLAST programs known in the art. Percent homology, sequence identity or complementarity, can be determined by, for example, the Gap program (Wisconsin Sequence Analysis Package, Version 8 for Unix, Genetics Computer Group, University Research Park, Madison Wis.), using default settings, which uses the algorithm of Smith and Waterman.

[0359] In some embodiments, the term “Thermal Melting Point (Tm)” refers to the temperature, under defined ionic strength, pH, and nucleic acid concentration, at which 50% of the oligonucleotides complementary to the target sequence hybridize to the target sequence at equilibrium. Typically, stringent conditions will be those in which the salt concentration is at least about 0.01 to 1.0 M Na ion concentration (or other salts) at pH 7.0 to 8.3 and the temperature is at least about 30° C. for short oligonucleotides (e.g., 10 to 50 nucleotide). Stringent conditions may also be achieved with the addition of destabilizing agents such as formamide.

[0360] In some embodiments, “modulation” means either an increase (stimulation) or a decrease (inhibition) in the expression of a gene.

[0361] In some embodiments, the term “variant”, when used in the context of a polynucleotide sequence, may encompass a polynucleotide sequence related to a wild type gene. This definition may also include, for example, “allelic,” “splice,” “species,” or “polymorphic” variants. A splice variant may have significant identity to a reference molecule, but will generally have a greater or lesser number of polynucleotides due to alternate splicing of exons during mRNA processing. The corresponding polypeptide may possess additional functional domains or an absence of domains. Species variants are polynucleotide sequences that vary from one species to another. Of particular utility are variants of wild type gene products. Variants may result from at least one mutation in the nucleic acid sequence and may result in altered mRNAs or in polypeptides whose structure or function may or may not be altered. Any given natural or recombinant gene may have none, one, or many allelic forms. Common mutational changes that give rise to variants are generally ascribed to natural deletions, additions, or substitutions of nucleotides. Each of these types of changes may occur alone, or in combination with the others, one or more times in a given sequence.

[0362] The resulting polypeptides generally will have significant amino acid identity relative to each other. A polymorphic variant is a variation in the polynucleotide sequence of a particular gene between individuals of a given species. Polymorphic variants also may encompass “single nucleotide polymorphisms” (SNPs,) or single base mutations in which the polynucleotide sequence varies by one base. The presence of SNPs may be indicative of, for example, a certain population with a propensity for a disease state, that is susceptibility versus resistance.

[0363] Derivative polynucleotides include nucleic acids subjected to chemical modification, for example, replacement of hydrogen by an alkyl, acyl, or amino group. Derivatives, e.g., derivative oligonucleotides, may comprise non-naturally-occurring portions, such as altered sugar moieties or inter-sugar linkages. Exemplary among these are phosphorothioate and other sulfur containing species which are known in the art. Derivative nucleic acids may also contain labels, including radionucleotides, enzymes, fluorescent agents, chemiluminescent agents, chromogenic agents, substrates, co factors, inhibitors, magnetic particles, and the like.

[0364] The term “C_{x-y}” or “Cₓ-C_{y}” when used in conjunction with a chemical moiety, such as alkyl, alkenyl, or alkynyl is meant to include groups that contain from x to y carbons in the chain. For example, the term “C₁₋₆alkyl” refers to substituted or unsubstituted saturated hydrocarbon groups, including straight-chain alkyl and branched-chain alkyl groups that contain from 1 to 6 carbons.

[0365] The terms “C_{x-y}alkenyl” and “C_{x-y}alkynyl” refer to substituted or unsubstituted unsaturated aliphatic groups analogous in length and possible substitution to the alkyls described above, but that contain at least one double or triple bond, respectively.

[0366] The term “carbocycle” as used herein refers to a saturated, unsaturated or aromatic ring in which each atom of the ring is carbon. Carbocycle includes 3- to 10-membered monocyclic rings, 5- to 12-membered bicyclic rings, 5- to 12-membered spiro bicycles, and 5- to 12-membered bridged rings. Each ring of a bicyclic carbocycle may be selected from saturated, unsaturated, and aromatic rings. In an exemplary embodiment, an aromatic ring, e.g., phenyl, may be fused to a saturated or unsaturated ring, e.g., cyclohexane, cyclopentane, or cyclohexene. A bicyclic carbocycle includes any combination of saturated, unsaturated and aromatic bicyclic rings, as valence permits. A bicyclic carbocycle further includes spiro bicyclic rings such as spiropentane. A bicyclic carbocycle includes any combination of ring sizes such as 3-3 spiro ring systems, 4-4 spiro ring systems, 4-5 fused ring systems, 5-5 fused ring systems, 5-6 fused ring systems, 6-6 fused ring systems, 5-7 fused ring systems, 6-7 fused ring systems, 5-8 fused ring systems, and 6-8 fused ring systems. Exemplary carbocycles include cyclopentyl, cyclohexyl, cyclohexenyl, adamantyl, phenyl, indanyl, naphthyl, and bicyclo[1.1.1]pentanyl.

[0367] The term “aryl” refers to an aromatic monocyclic or aromatic multicyclic hydrocarbon ring system. The aromatic monocyclic or aromatic multicyclic hydrocarbon ring system contains only hydrogen and carbon and from five to eighteen carbon atoms, where at least one of the rings in the ring system is aromatic, i.e., it contains a cyclic, delocalized (4n+2) π-electron system in accordance with the Hückel theory. The ring system from which aryl groups are derived include, but are not limited to, groups such as benzene, fluorene, indane, indene, tetralin and naphthalene.

[0368] The term “cycloalkyl” refers to a saturated ring in which each atom of the ring is carbon. Cycloalkyl may include monocyclic and polycyclic rings such as 3- to 10-membered monocyclic rings, 5- to 12-membered bicyclic rings, 5- to 12-membered spiro bicycles, and 5- to 12-membered bridged rings. In certain embodiments, a cycloalkyl comprises three to ten carbon atoms. In other embodiments, a cycloalkyl comprises five to seven carbon atoms. The cycloalkyl may be attached to the rest of the molecule by a single bond. Examples of monocyclic cycloalkyls include, e.g., cyclopropyl, cyclobutyl, cyclopentyl, cyclohexyl, cycloheptyl, and cyclooctyl. Polycyclic cycloalkyl radicals include, for example, adamantyl, spiropentane, norbornyl (i.e., bicyclo[2.2.1]heptanyl), decalinyl, 7,7 dimethyl bicyclo[2.2.1]heptanyl, bicyclo[1.1.1]pentanyl, and the like.

[0369] The term “cycloalkenyl” refers to a saturated ring in which each atom of the ring is carbon and there is at least one double bond between two ring carbons. Cycloalkenyl may include monocyclic and polycyclic rings such as 3- to 10-membered monocyclic rings, 6- to 12-membered bicyclic rings, and 5- to 12-membered bridged rings. In other embodiments, a cycloalkenyl comprises five to seven carbon atoms. The cycloalkenyl may be attached to the rest of the molecule by a single bond. Examples of monocyclic cycloalkenyls include, e.g., cyclopentenyl, cyclohexenyl, cycloheptenyl, and cyclooctenyl.

[0370] The term “halo” or, alternatively, “halogen” or “halide,” means fluoro, chloro, bromo or iodo. In some embodiments, halo is fluoro, chloro, or bromo.

[0371] The term “haloalkyl” refers to an alkyl radical, as defined above, that is substituted by one or more halo radicals, for example, trifluoromethyl, dichloromethyl, bromomethyl, 2,2,2-trifluoroethyl, 1-chloromethyl-2-fluoroethyl, and the like. In some embodiments, the alkyl part of the haloalkyl radical is optionally further substituted as described herein.

[0372] The term “heterocycle” as used herein refers to a saturated, unsaturated or aromatic ring comprising one or more heteroatoms. Exemplary heteroatoms include N, O, Si, P, B, and S atoms. Heterocycles include 3- to 10-membered monocyclic rings, 6- to 12-membered bicyclic rings, 5- to 12-membered spiro bicycles, and 5- to 12-membered bridged rings. A bicyclic heterocycle includes any combination of saturated, unsaturated and aromatic bicyclic rings, as valence permits. In an exemplary embodiment, an aromatic ring, e.g., pyridyl, may be fused to a saturated or unsaturated ring, e.g., cyclohexane, cyclopentane, morpholine, piperidine or cyclohexene. A bicyclic heterocycle includes any combination of ring sizes such as 4-5 fused ring systems, 5-5 fused ring systems, 5-6 fused ring systems, 6-6 fused ring systems, 5-7 fused ring systems, 6-7 fused ring systems, 5-8 fused ring systems, and 6-8 fused ring systems. A bicyclic heterocycle further includes spiro bicyclic rings, e.g., 5 to 12-membered spiro bicycles, such as 2-oxa-6-azaspiro[3.3]heptane.

[0373] The term “heteroaryl” refers to a radical derived from a 5 to 18 membered aromatic ring radical that comprises two to seventeen carbon atoms and from one to six heteroatoms selected from nitrogen, oxygen and sulfur. As used herein, the heteroaryl radical is a monocyclic, bicyclic, tricyclic or tetracyclic ring system, wherein at least one of the rings in the ring system is aromatic, i.e., it contains a cyclic, delocalized (4n+2) π-electron system in accordance with the Hückel theory. Heteroaryl includes fused or bridged ring systems. The heteroatom(s) in the heteroaryl radical is optionally oxidized. One or more nitrogen atoms, if present, are optionally quaternized. The heteroaryl is attached to the rest of the molecule through any atom of the ring(s). Examples of heteroaryls include, but are not limited to, azepinyl, acridinyl, benzimidazolyl, benzindolyl, 1,3-benzodioxolyl, benzofuranyl, benzoxazolyl, benzo[d]thiazolyl, benzothiadiazolyl, benzo[b][1,4]dioxepinyl, benzo[b][1,4]oxazinyl, 1,4-benzodioxanyl, benzonaphthofuranyl, benzoxazolyl, benzodioxolyl, benzodioxinyl, benzopyranyl, benzopyranonyl, benzofuranyl, benzofuranonyl, benzothienyl (benzothiophenyl), benzothieno[3,2-d]pyrimidinyl, benzotriazolyl, benzo[4,6]imidazo[1,2-a]pyridinyl, carbazolyl, cinnolinyl, cyclopenta[d]pyrimidinyl, 6,7-dihydro-5H-cyclopenta[4,5]thieno[2,3-d]pyrimidinyl, 5,6-dihydrobenzo[h]quinazolinyl, 5,6-dihydrobenzo[h]cinnolinyl, 6,7-dihydro-5H-benzo[6,7]cyclohepta[1,2-c]pyridazinyl, dibenzofuranyl, dibenzothiophenyl, furanyl, furanonyl, furo[3,2-c]pyridinyl, 5,6,7,8,9,10-hexahydrocycloocta[d]pyrimidinyl, 5,6,7,8,9,10-hexahydrocycloocta[d]pyridazinyl, 5,6,7,8,9,10-hexahydrocycloocta[d]pyridinyl, isothiazolyl, imidazolyl, indazolyl, indolyl, indazolyl, isoindolyl, indolinyl, isoindolinyl, isoquinolyl, indolizinyl, isoxazolyl, 5,8-methano-5,6,7,8-tetrahydroquinazolinyl, naphthyridinyl, 1,6-naphthyridinonyl, oxadiazolyl, 2-oxoazepinyl, oxazolyl, oxiranyl, 5,6,6a,7,8,9,10,10a-octahydrobenzo[h]quinazolinyl, 1-phenyl-1H-pyrrolyl, phenazinyl, phenothiazinyl, phenoxazinyl, phthalazinyl, pteridinyl, purinyl, pyrrolyl, pyrazolyl, pyrazolo[3,4-d]pyrimidinyl, pyridinyl, pyrido[3,2-d]pyrimidinyl, pyrido[3,4-d]pyrimidinyl, pyrazinyl, pyrimidinyl, pyridazinyl, pyrrolyl, quinazolinyl, quinoxalinyl, quinolinyl, isoquinolinyl, tetrahydroquinolinyl, 5,6,7,8-tetrahydroquinazolinyl, 5,6,7,8-tetrahydrobenzo[4,5]thieno[2,3-d]pyrimidinyl, 6,7,8,9-tetrahydro-5H-cyclohepta[4,5]thieno[2,3-d]pyrimidinyl, 5,6,7,8-tetrahydropyrido[4,5-c]pyridazinyl, thiazolyl, thiadiazolyl, triazolyl, tetrazolyl, triazinyl, thieno[2,3-d]pyrimidinyl, thieno[3,2-d]pyrimidinyl, thieno[2,3-c]pyridinyl, and thiophenyl (i.e. thienyl).

[0374] The term “heterocycloalkyl” refers to a saturated ring with carbon atoms and at least one heteroatom. Exemplary heteroatoms include N, O, Si, P, B, and S atoms. Heterocycloalkyl may include monocyclic and polycyclic rings such as 3- to 10-membered monocyclic rings, 6- to 12-membered bicyclic rings, 5- to 12-membered spiro bicycles, and 5- to 12-membered bridged rings. The heteroatoms in the heterocycloalkyl radical are optionally oxidized. One or more nitrogen atoms, if present, are optionally quaternized. The heterocycloalkyl is attached to the rest of the molecule through any atom of the heterocycloalkyl, valence permitting, such as any carbon or nitrogen atoms of the heterocycloalkyl. Examples of heterocycloalkyl radicals include, but are not limited to, dioxolanyl, thienyl[1,3]dithianyl, decahydroisoquinolyl, imidazolinyl, imidazolidinyl, isothiazolidinyl, isoxazolidinyl, morpholinyl, octahydroindolyl, octahydroisoindolyl, 2-oxopiperazinyl, 2-oxopiperidinyl, 2-oxopyrrolidinyl, oxazolidinyl, piperidinyl, piperazinyl, 4-piperidonyl, pyrrolidinyl, pyrazolidinyl, quinuclidinyl, thiazolidinyl, tetrahydrofuryl, trithianyl, tetrahydropyranyl, thiomorpholinyl, thiamorpholinyl, 1-oxo-thiomorpholinyl, 2-oxa-6-azaspiro[3.3]heptane, and 1,1-dioxo-thiomorpholinyl.

[0375] The term “heterocycloalkenyl” refers to an unsaturated ring with carbon atoms and at least one heteroatom and there is at least one double bond between two ring carbons. Heterocycloalkenyl does not include heteroaryl rings. Exemplary heteroatoms include N, O, Si, P, B, and S atoms. Heterocycloalkenyl may include monocyclic and polycyclic rings such as 3- to 10-membered monocyclic rings, 6- to 12-membered bicyclic rings, and 5- to 12-membered bridged rings. In other embodiments, a heterocycloalkenyl comprises five to seven ring atoms. The heterocycloalkenyl may be attached to the rest of the molecule by a single bond. Examples of monocyclic cycloalkenyls include, e.g., pyrroline (dihydropyrrole), pyrazoline (dihydropyrazole), imidazoline (dihydroimidazole), triazoline (dihydrotriazole), dihydrofuran, dihydrothiophene, oxazoline (dihydrooxazole), isoxazoline (dihydroisoxazole), thiazoline (dihydrothiazole), isothiazoline (dihydroisothiazole), oxadiazoline (dihydrooxadiazole), thiadiazoline (dihydrothiadiazole), dihydropyridine, tetrahydropyridine, dihydropyridazine, tetrahydropyridazine, dihydropyrimidine, tetrahydropyrimidine, dihydropyrazine, tetrahydropyrazine, pyran, dihydropyran, thiopyran, dihydrothiopyran, dioxine, dihydrodioxine, oxazine, dihydrooxazine, thiazine, and dihydrothiazine.

[0376] The term “substituted” refers to moieties having substituents replacing a hydrogen on one or more carbons or substitutable heteroatoms, e.g., an NH or NH₂ of a compound. It will be understood that “substitution” or “substituted with” includes the implicit proviso that such substitution is in accordance with permitted valence of the substituted atom and the substituent, and that the substitution results in a stable compound, i.e., a compound which does not spontaneously undergo transformation such as by rearrangement, cyclization, elimination, etc. In certain embodiments, substituted refers to moieties having substituents replacing two hydrogen atoms on the same carbon atom, such as substituting the two hydrogen atoms on a single carbon with an oxo, imino or thioxo group. As used herein, the term “substituted” is contemplated to include all permissible substituents of organic compounds. In a broad aspect, the permissible substituents include acyclic and cyclic, branched and unbranched, carbocyclic and heterocyclic, aromatic and non-aromatic substituents of organic compounds. The permissible substituents can be one or more and the same or different for appropriate organic compounds.

[0377] In some embodiments, substituents may include any substituents described herein, for example: halogen, hydroxy, oxo (═O), thioxo (═S), cyano (—CN), nitro (—NO₂), imino (═N—H), oximo (═N—OH), hydrazino (═N—NH₂), —R^{b}—OR^{a}, —R^{b}—OC(O)—R^{a}, —R^{b}—OC(O)—OR^{a}, —R^{b}—OC(O)—N(R^{a})₂, —R^{b}—N(R^{a})₂, —R^{b}—C(O)R^{a}, —R^{b}—C(O)OR^{a}, —R^{b}—C(O)N(R^{a})₂, —R^{b}—O—R^{c}—C(O)N(R^{a})₂, —R^{b}—N(R^{a})C(O)OR^{a}, —R^{b}—N(R^{a})C(O)R^{a}, —R^{b}—N(R^{a})S(O)ₜR^{a} (where t is 1 or 2), —R^{b}—S(O)ₜR^{a} (where t is 1 or 2), —R^{b}—S(O)ₜOR^{a} (where t is 1 or 2), and —R^{b}—S(O)ₜN(R^{a})₂ (where t is 1 or 2); and alkyl, alkenyl, alkynyl, aryl, aralkyl, aralkenyl, aralkynyl, cycloalkyl, cycloalkylalkyl, heterocycloalkyl, heterocycloalkylalkyl, heteroaryl, and heteroarylalkyl, any of which may be optionally substituted by alkyl, alkenyl, alkynyl, halogen, haloalkyl, haloalkenyl, haloalkynyl, oxo (═O), thioxo (═S), cyano (—CN), nitro (—NO₂), imino (═N—H), oximo (═N—OH), hydrazine (═N—NH₂), —R^{b}—OR^{a}, —R^{b}—OC(O)—R^{a}, —R^{b}—OC(O)—OR^{a}, —R^{b}—OC(O)—N(R^{a})₂, —R^{b}—N(R^{a})₂, —R^{b}—C(O)R^{a}, —R^{b}—C(O)OR^{a}, —R^{b}—C(O)N(R^{a})₂, —R^{b}—O—R^{c}—C(O)N(R^{a})₂, —R^{b}—N(R^{a})C(O)OR^{a}, —R^{b}—N(R^{a})C(O)R^{a}, —R^{b}—N(R^{a})S(O)ₜR^{a} (where t is 1 or 2), —R^{b}—S(O)ₜR^{a} (where t is 1 or 2), —R^{b}—S(O)ₜOR^{a} (where t is 1 or 2) and —R^{b}—S(O)ₜN(R^{a})₂ (where t is 1 or 2); wherein each R^{a} is independently selected from hydrogen, alkyl, cycloalkyl, cycloalkylalkyl, aryl, aralkyl, heterocycloalkyl, heterocycloalkylalkyl, heteroaryl, or heteroarylalkyl, wherein each R^{a}, valence permitting, may be optionally substituted with alkyl, alkenyl, alkynyl, halogen, haloalkyl, haloalkenyl, haloalkynyl, oxo (═O), thioxo (═S), cyano (—CN), nitro (—NO₂), imino (═N—H), oximo (═N—OH), hydrazine (═N—NH₂), —R^{b}—OR^{a}, —R^{b}—OC(O)—R^{a}, —R^{b}—OC(O)—OR^{a}, —R^{b}—OC(O)—N(R^{a})₂, —R^{b}—N(R^{a})₂, —R^{b}—C(O)R^{a}, —R^{b}—C(O)OR^{a}, —R^{b}—C(O)N(R^{a})₂, —R^{b}—O—R^{c}—C(O)N(R^{a})₂, —R^{b}—N(R^{a})C(O)OR^{a}, —R^{b}—N(R^{a})C(O)R^{a}, —R^{b}—N(R^{a})S(O)ₜR^{a} (where t is 1 or 2), —R^{b}—S(O)ₜR^{a} (where t is 1 or 2), —R^{b}—S(O)ₜOR^{a} (where t is 1 or 2) and —R^{b}—S(O)ₜN(R^{a})₂ (where t is 1 or 2); and wherein each R^{b} is independently selected from a direct bond or a straight or branched alkylene, alkenylene, or alkynylene chain, and each R^{c} is a straight or branched alkylene, alkenylene or alkynylene chain.

[0378] Double bonds to oxygen atoms, such as oxo groups, are represented herein as both “═O” and “(O)”. Double bonds to nitrogen atoms are represented as both “═NR” and “(NR)”. Double bonds to sulfur atoms are represented as both “═S” and “(S)”.

[0379] In some embodiments, a “derivative” polypeptide or peptide is one that is modified, for example, by glycosylation, pegylation, phosphorylation, sulfation, reduction/alkylation, acylation, chemical coupling, or mild formalin treatment. A derivative may also be modified to contain a detectable label, either directly or indirectly, including, but not limited to, a radioisotope, fluorescent, and enzyme label.

[0380] Some embodiments refer to nucleic acid sequence information. In some embodiments, any uracil (U) may be interchanged with any thymine (T), and vice versa. For example, in an siRNA with a nucleic acid sequence comprising one or more Us, in some embodiments any of the Us may be replaced with Ts. Similarly, in an siRNA with a nucleic acid sequence comprising one or more Ts, in some embodiments any of the Ts may be replaced with Us. In some embodiments, an oligonucleotide such as an siRNA disclosed herein comprises or consists of RNA. In some embodiments, the oligonucleotide may comprise or consist of DNA. To any extent that the sequence listing contradicts the disclosure in the specification, the specification takes precedent.

[0381] Some aspects include sequences with nucleotide modifications or modified internucleoside linkages. Generally, and unless otherwise specified, Nf (e.g. Af, Cf, Gf, Tf, or Uf) refers to a 2′ fluoro-modified nucleoside, dN (e.g. dA, dC, dG, dT, or dU) refers to a 2′ deoxy nucleoside, n (e.g. a, c, g, t, or u) refers to a 2′ O-methyl modified nucleoside, and “s” refers to a phosphorothioate linkage.

[0382] A pyrimidine may include cytosine (C), thymine (T), or uracil (U). A pyrimidine may include C or U. A pyrimidine may include C or T. A reference to a pyrimidine may include a nucleoside or nucleotide comprising the pyrimidine. A purine may include guanine (G) or adenine (A). A reference to a purine may include a nucleoside or nucleotide comprising a purine.

[0383] The section headings used herein are for organizational purposes only and are not to be construed as limiting the subject matter described.

### VI. EXAMPLES

### Example 1: Nonsynonymous Variants in the SOS2 Gene Demonstrate Protective Associations Across a Spectrum of Diseases and Traits

[0384] Applicant evaluated two missense variants (Table 5) in approximately 452,000 individuals with genotype data from the UK Biobank cohort for associations with a variety of traits. The variants are rs72681869, a low frequency (EAF=0.01) missense variant (Pro191Arg; P191R) located in the N-terminal histone-fold domain of SOS2, and rs72681869 is a rare (EAF=0.001) missense variant (Leu183Phe; L183F) also located in the N-terminal histone-fold domain. The applicants hypothesize that individually these variants result in a decrease in the abundance and/or activity of the SOS2 gene product, and that it is this loss of function (LoF) that leads to the observed genetic associations. Stepwise conditional analyses in multiple traits, as well as direct evaluation of linkage disequilibrium, confirmed that these are independent variants. Therefore, these two variants were combined and tested in a gene burden test to increase statistical power and collectively represent inhibition of SOS2.

TABLE 5
SOS2 genetic variants/instruments utilized in this study

| | | | Proposed | |
|---|---|---|---|---|
| | | | Effect on | Effect |
| | | | Gene/Protein | Allele |
| | | | Function or | Frequency |
| Variant | Gene | Consequence | Expression | (EAF) |
| rs72681869 | SOS2 | missense (Pro191Arg; | ↓ | 0.01 |
| | | P191R) | | |
| rs137961578 | SOS2 | missense (Leu183Phe; | ↓ | 0.001 |
| | | L183F) | | |
| Burden | SOS2 | P191R and/or L183F | ↓ | 0.01 |

[0385] These analyses resulted in identification of pleiotropic associations for the SOS2 missense variants. For example, there were protective associations across a broad range of common cardiometabolic diseases and traits. The SOS2 burden is significantly associated with decreased alanine aminotransferase (ALT) and aspartate aminotransferase (AST), decreased MRI-deriver liver fat percentage, decreased risk of non-alcoholic fatty liver disease (NAFLD) and decreased blood triglycerides, suggesting that SOS2 inhibition may protect against fatty and fibrotic liver disease and hyperlipidemia (Table 6). The SOS2 burden is also associated with decreased risk of type 2 diabetes (T2D), use of diabetes medications, family history of diabetes and decreased hemoglobin A1C, suggesting that SOS2 inhibition may protect against diabetes (Table 7). The SOS2 burden is also associated with decreased risk for obesity, decreased body mass index (BMI), decreased waist and hip circumference and decreased body fat percentage, suggesting that SOS2 inhibition may protect against obesity (Table 8). The SOS2 burden is also associated with decreased risk of hypertension, decreased systolic and diastolic blood pressure (SBP and DBP), decreased mean arterial pressure (MAP) and decreased use of antihypertensive medications, suggesting that SOS2 inhibition may protect against hypertension. (Table 9). The SOS2 burden is also associated with decreased risk of all-cause cerebrovascular disease, ischemic cerebrovascular disease and family history of stroke, suggesting that SOS2 inhibition may protect against cerebrovascular disease (Table 10). The SOS2 burden is also associated with decreased blood urate, decreased risk of gout and decreased use of gout medications, suggesting that SOS2 inhibition may protect against gout and hyperuricemia (Table 11). The SOS2 burden is also associated with increased estimated glomerular filtration rate (eGFR) and decreased blood creatinine, decreased blood urea nitrogen (BUN), decreased risk of chronic kidney disease (CKD), decreased risk of proteinuria and decreased urinary microalbumin, suggesting that SOS2 inhibition may protect against kidney disease (Table 12).

TABLE 6
SOS2 liver associations

| | | | Alanine | | Aspartate | |
|---|---|---|---|---|---|---|
| | | | Aminotransferase | | Aminotransferase | |
| | | | (n = 430,545) | | (n = 429,246) | |
| Variant | Gene | EAF | P value | Beta | P value | Beta |
| Burden | SOS2 | 0.01 | 8.99E−24 | ↓−0.019 | 1.35E−31 | ↓−0.013 |

| | | | MRI Liver Fat % | | Blood Triglycerides | |
|---|---|---|---|---|---|---|
| | | | (n = 14,875) | | (n = 430,833) | |
| Variant | Gene | EAF | P value | Beta | P value | Beta |
| Burden | SOS2 | 0.01 | 0.002 | ↓−0.163 | 1.95E−07 | ↓−0.011 |

Non-Alcoholic Fatty
Liver Disease
(n = 7,792)

| Variant | Gene | EAF | P value | OR |
|---|---|---|---|---|
| Burden | SOS2 | 0.01 | 0.002 | ↓0.838 |

TABLE 7
SOS2 diabetes associations

| | | | Type 2 Diabetes mellitus | | Rx for Diabetes | |
|---|---|---|---|---|---|---|
| | | | (n = 37,012) | | (n = 29,596) | |
| Variant | Gene | EAF | P value | OR | P value | OR |
| Burden | SOS2 | 0.01 | 2.61E−07 | ↓0.838 | 2.89E−05 | ↓0.842 |

| | | | Family History of Diabetes | | Hemoglobin A1C | |
|---|---|---|---|---|---|---|
| | | | (n = 92,301) | | (n = 410,975) | |
| Variant | Gene | EAF | P value | OR | P value | Beta |
| Burden | SOS2 | 0.01 | 8.64E−04 | ↓0.921 | 3.63E−12 | ↓−0.003 |

TABLE 8
SOS2 obesity associations

| | | | Obesity | | Body Mass Index | |
|---|---|---|---|---|---|---|
| | | | (n = 51,170) | | (n = 445,825) | |
| Variant | Gene | EAF | P value | OR | P value | Beta |
| Burden | SOS2 | 0.01 | 2.07E−04 | ↓0.868 | 3.13E−08 | ↓−0.050 |

| | | | Waist Circumference | | Hip Circumference | |
|---|---|---|---|---|---|---|
| | | | (n = 449,256) | | (n = 446,083) | |
| Variant | Gene | EAF | P value | Beta | P value | Beta |
| Burden | SOS2 | 0.01 | 8.52E−09 | ↓−0.003 | 3.62E−09 | ↓−0.002 |

Body Fat %
(n = 444,332)

| Variant | Gene | EAF | P value | Beta |
|---|---|---|---|---|
| Burden | SOS2 | 0.01 | 5.57E−12 | ↓−0.007 |

TABLE 9
SOS2 hypertension associations

| | | | Essential | | Systolic Blood | |
|---|---|---|---|---|---|---|
| | | | Hypertension | | Pressure | |
| | | | (n = 177,488) | | (n = 425,193) | |
| Variant | Gene | EAF | P value | OR | P value | Beta |
| Burden | SOS2 | 0.01 | 7.07E−12 | ↓0.831 | 4.82E−18 | ↓−0.006 |

| | | | Diastolic Blood | | Mean Arterial | |
|---|---|---|---|---|---|---|
| | | | Pressure | | Pressure | |
| | | | (n = 425,809) | | (n = 423,798) | |
| Variant | Gene | EAF | P value | Beta | P value | Beta |
| Burden | SOS2 | 0.01 | 8.82E−20 | ↓−0.006 | 8.10E−21 | ↓−1.343 |

Rx for Hypertension
(n = 130,907)

| Variant | Gene | EAF | P value | OR |
|---|---|---|---|---|
| Burden | SOS2 | 0.01 | 6.12E−13 | ↓0.818 |

TABLE 10
cerebrovascular associations

| | | | Cerebrovascular | | Ischemic | | Family History | |
|---|---|---|---|---|---|---|---|---|
| | | | Diseases | | Cerebrovascular | | of Stroke | |
| | | | (n = 29,617) | | Disease (n = 18,115) | | (n = 119,462) | |
| Variant | Gene | EAF | P value | OR | P value | OR | P value | OR |
| Burden | SOS2 | 0.01 | 1.05E−05 | ↓0.846 | 5.05E−04 | ↓0.853 | 0.027 | ↓0.951 |

TABLE 11
SOS2 gout associations

| | | | Blood Urate | | Gout | | Rx for Gout | |
|---|---|---|---|---|---|---|---|---|
| | | | (n = 431,774) | | (n = 24,226) | | (n = 22,408) | |
| Variant | Gene | EAF | P value | Beta | P value | OR | P value | OR |
| Burden | SOS2 | 0.01 | 6.17E−14 | ↓−0.009 | 3.62E−07 | ↓0.767 | 7.58E−09 | ↓0.755 |

TABLE 12
kidney associations

| | | | eGFR | | Creatinine | |
|---|---|---|---|---|---|---|
| | | | (n = 432,345) | | (n = 430,258) | |
| Variant | Gene | EAF | P value | Beta | P value | Beta |
| Burden | SOS2 | 0.01 | 3.94E−12 | ↑0.066 | 3.86E−12 | ↓−0.006 |

| | | | BUN | | Chronic Kidney Disease | |
|---|---|---|---|---|---|---|
| | | | (n = 431,470) | | (n = 23,130) | |
| Variant | Gene | EAF | P value | Beta | P value | OR |
| Burden | SOS2 | 0.01 | 3.27E−04 | ↓−0.004 | 8.57E−05 | ↓0.867 |

| | | | Proteinuria | | Urine Microalbumin | |
|---|---|---|---|---|---|---|
| | | | (n = 2,801) | | (n = 138,748) | |
| Variant | Gene | EAF | P value | OR | P value | Beta |
| Burden | SOS2 | 0.01 | 0.043 | ↓0.836 | 9.29E−03 | ↓−0.045 |

[0386] Applicant also identified protective associations across a range of ophthalmic diseases and traits. For example, the SOS2 burden is associated with decreased risk of glaucoma, primary open-angle glaucoma (POAG), decreased use of glaucoma medications, decreased risk of surgery for glaucoma, decreased intraocular pressure and decreased vertical cup-disc ratio, suggesting that SOS2 inhibition may protect against glaucoma and ocular hypertension (Table 13). The SOS2 burden is also associated with decreased risk of macular degeneration, diabetic retinopathy and decreased thickness of the retinal pigment epithelium (RPE), suggesting that SOS2 inhibition may protect against retinal disorders such as macular degeneration and diabetic retinopathy (Table 14).

TABLE 13
SOS2 glaucoma associations

| | | | Glaucoma | | Primary Open-Angle | |
|---|---|---|---|---|---|---|
| | | | (n = 18,181) | | Glaucoma (n = 3,925) | |
| Variant | Gene | EAF | P value | OR | P value | OR |
| Burden | SOS2 | 0.01 | 7.14E−06 | ↓0.824 | 3.19E−07 | ↓0.634 |
| | | | Rx for Glaucoma | | Surgery for Glaucoma | |
| | | | (n = 16,721) | | (n = 1,960) | |
| Variant | Gene | EAF | P value | OR | P value | OR |
| Burden | SOS2 | 0.01 | 7.72E−06 | ↓0.782 | 7.90E−05 | ↓0.475 |

| | | | Intraocular Pressure | | OCT Vertical Cup-Disc | |
|---|---|---|---|---|---|---|
| | | | (n = 108,466) | | Ratio (n = 60,439) | |
| Variant | Gene | EAF | P value | Beta | P value | Beta |
| Burden | SOS2 | 0.01 | 5.83E−09 | ↓−0.113 | 0.001 | ↓−0.015 |

TABLE 14
SOS2 retinal disease associations

| | | | Macular | | Diabetic | | OCT Retinal Pigment | |
|---|---|---|---|---|---|---|---|---|
| | | | Degeneration | | Retinopathy | | Epithelium Thickness | |
| | | | (n = 13,565) | | (n = 8,974) | | (n = 69,955) | |
| Variant | Gene | EAF | P value | OR | P value | OR | P value | Beta |
| Burden | SOS2 | 0.01 | 1.17E−04 | ↓0.827 | 6.34E−04 | ↓0.833 | 0.001 | ↑0.080 |

[0387] These protective associations with putative loss of function variants in SOS2 across several related and distinct diseases and traits suggest that inhibition of SOS2 could be therapeutic in these diseases.

### Example 2: SiRNA-Mediated Knockdown of SOS2 in PODO/TERT256 Cell Line

[0388] siRNAs will be targeted to SOS2 mRNA that may downregulate levels of SOS2 mRNA leading to a decrease in RAC1 protein activation, when administered to the cultured immortalized human podocyte cell line PODO/TERT256 (Evercyte Cat. No. CHT-033-0256).

[0389] On Day 0, the PODO/TERT256 cells will be seeded at 150,000 cells/mL into a Falcon 24-well tissue culture plate (ThermoFisher Cat. No. 353047) at 0.5 mL per well.

[0390] On Day 1, the SOS2 siRNA and negative control siRNA master mixes will be prepared. The SOS2 siRNA master mix will contain 350 μL of Opti-MEM (ThermoFisher Cat. No. 4427037-s1288 Lot No. AS02B02D) and 3.5 ul of a mixture of the two SOS2 siRNAs (10 uM stock). The negative control siRNA master mix will contain 350 μL of Opti-MEM and 3.5 ul of negative control siRNA (ThermoFisher Cat. No. 4390843, 10 uM stock). Next, 3 μL of TransIT-X2 (Mirus Cat. No. MIR-6000) is added to each master mix. The mixes are incubated for 15 minutes to allow transfection complexes to form, then 51 ul of the appropriate master mix+TransIT-X2 is added to duplicate wells of PODO/TERT256 cells with a final siRNA concentration of 10 nM.

[0391] On Day 3, 48 hours post-transfection, duplicate wells will be lysed using the Cells-to-Ct kit according to the manufacturer's protocol (ThermoFisher Cat. No. 4399002) or protein lysis buffer containing protease and phosphatase inhibitors. For the Cells-to-Ct, cells are washed with 50 ul using cold 1×PBS and lysed by adding 49.5 ul of Lysis Solution and 0.5 ul DNase I per well and pipetting up and down 5 times and incubating for 5 minutes at room temperature. The Stop Solution (5 ul/well) is added to each well and mixed by pipetting up and down five times and incubating at room temperature for 2 minutes. The reverse transcriptase reaction is performed using 22.5 ul of the lysate according to the manufacturer's protocol. Samples are stored at −80° C. until real-time qPCR is performed in triplicate using TaqMan Gene Expression Assays (Applied Biosystems FAM/SOS2 using a BioRad CFX96 Cat. No. 1855195). For the protein quantification, equivalent quantities (30-50 μg) of protein are separated by 10% SDS polyacrylamide gels and transferred to polyvinylidene fluoride membranes. Membranes are blocked with 5% nonfat milk and incubated overnight with the appropriate primary antibody at dilutions specified by the manufacturer. Next, the membranes are washed three times in TBST and incubated with the corresponding horseradish peroxidase conjugated secondary antibody at 1:5,000 dilution for 1 hr. Bound secondary antibody is detected using an enhanced chemiluminescence system. Primary immunoblotting antibodies are: anti-GAPDH, anti-RAC1, anti-GTP-RAC1 (Sigma, MO) and anti-SOS2 (Abcam, Cambridge, UK).

[0392] A decrease in SOS2 mRNA expression in the PODO/TERT256 cells is expected after transfection with the SOS2 siRNAs compared to SOS2 mRNA levels in PODO/TERT256 cells transfected with the non-specific control siRNA 48 hours after transfection. There is an expected decrease in the amount of activated RAC1, measured by quantifying the amount of GTP bound RAC1 versus total RAC1 in wells containing PODO/TERT256 cells transfected with the SOS2 siRNAs relative to the amount of GTP bound RAC1 versus total RAC1 in wells containing PODO/TERT256 cells transfected with a non-specific control siRNA 48 hours after transfection. These results are expected to show that the SOS2 siRNAs elicit knockdown of SOS2 mRNA in PODO/TERT256 cells and that the decrease in SOS2 expression is correlated with a decrease in activated RAC1.

### Example 3: ASO-Mediated Knockdown of SOS2 in PODO/TERT256 Cell Line

[0393] ASOs will be targeted to SOS2 mRNA that may downregulate levels of SOS2 mRNA leading to a decrease in RAC1 protein activation, when administered to the cultured immortalized human podocyte cell line PODO/TERT256 (Evercyte Cat. No. CHT-033-0256).

[0394] On Day 0, the PODO/TERT256 cells will be seeded at 150,000 cells/mL into a Falcon 24-well tissue culture plate (ThermoFisher Cat. No. 353047) at 0.5 mL per well.

[0395] On Day 1, the SOS2 ASO and negative control ASO master mixes will be prepared. The SOS2 ASO master mix will contain 350 uL of Opti-MEM (ThermoFisher Cat. No. 4427037-s1288 Lot No. AS02B02D) and 3.5 ul of a mixture of the two SOS2 ASOs (10 uM stock). The negative control ASO master mix will contain 350 uL of Opti-MEM and 3.5 ul of negative control ASO (ThermoFisher Cat. No. 4390843, 10 uM stock). Next, 3 uL of TransIT-X2 (Mirus Cat. No. MIR-6000) is added to each master mix. The mixes are incubated for 15 minutes to allow transfection complexes to form, then 51 ul of the appropriate master mix+TransIT-X2 is added to duplicate wells of PODO/TERT256 cells with a final ASO concentration of 10 nM.

[0396] On Day 3, 48 hours post transfection, duplicate wells will be lysed using the Cells-to-Ct kit according to the manufacturer's protocol (ThermoFisher Cat. No. 4399002) or protein lysis buffer containing protease and phosphatase inhibitors. For the Cells-to-Ct, cells are washed with 50 ul using cold 1×PBS and lysed by adding 49.5 ul of Lysis Solution and 0.5 ul DNase I per well and pipetting up and down 5 times and incubating for 5 minutes at room temperature. The Stop Solution (5 ul/well) is added to each well and mixed by pipetting up and down five times and incubating at room temperature for 2 minutes. The reverse transcriptase reaction is performed using 22.5 ul of the lysate according to the manufacturer's protocol. Samples are stored at −80° C. until real-time qPCR is performed in triplicate using TaqMan Gene Expression Assays (Applied Biosystems FAM/SOS2 using a BioRad CFX96 Cat. No. 1855195). For protein quantification, equivalent quantities (30-50 μg) of protein are separated by 10% SDS polyacrylamide gels and transferred to polyvinylidene fluoride membranes. Membranes are blocked with 5% nonfat milk and incubated overnight with the appropriate primary antibody at dilutions specified by the manufacturer. Next, the membranes are washed three times in TBST and incubated with the corresponding horseradish peroxidase conjugated secondary antibody at 1:5,000 dilution for 1 hr. Bound secondary antibody is detected using an enhanced chemiluminescence system. Primary immunoblotting antibodies are: anti-GAPDH, anti-RAC1, anti-GTP-RAC1 (Sigma, MO) and anti-SOS2 (Abcam, Cambridge, UK).

[0397] A decrease in SOS2 mRNA expression in the PODO/TERT256 cells is expected after transfection with the SOS2 ASOs compared to SOS2 mRNA levels in PODO/TERT256 cells transfected with the non-specific control ASO 48 hours after transfection. There is an expected decrease in the amount of activated RAC1, measured by quantifying the amount of GTP bound RAC1 versus total RAC1 in wells containing PODO/TERT256 cells transfected with the SOS2 ASOs relative to the amount of GTP bound RAC1 versus total RAC1 in wells containing PODO/TERT256 cells transfected with a non-specific control ASO 48 hours after transfection. These results are expected to show that the SOS2 ASOs elicit knockdown of SOS2 mRNA in PODO/TERT256 cells and that the decrease in SOS2 expression is correlated with a decrease in activated RAC1.

### Example 4: SiRNA-Mediated Knockdown of SOS2 in HepG2 Cell Line

[0398] siRNAs targeted to the SOS2 mRNA that downregulate levels of SOS2 mRNA leading to a decrease in RAC1 protein activation, when administered to the cultured human hepatocyte cell line, HepG2.

[0399] On Day 0, the HepG2 cells are seeded at 150,000 cells/mL into a Falcon 24-well tissue culture plate (ThermoFisher Cat. No. 353047) at 0.5 mL per well.

[0400] On Day 1, the SOS2 siRNA and negative control siRNA master mixes are prepared. The SOS2 siRNA master mix contains 350 uL of Opti-MEM (ThermoFisher Cat. No. 4427037-s1288 Lot No. AS02B02D) and 3.5 ul of a mixture of two SOS2 siRNAs (10 uM stock). The negative control siRNA master mix contains 350 uL of Opti-MEM and 3.5 ul of negative control siRNA (ThermoFisher Cat. No. 4390843, 10 uM stock). Next, 3 uL of TransIT-X2 (Mirus Cat. No. MIR-6000) is added to each master mix. The mixes are incubated for 15 minutes to allow transfection complexes to form, then 51 ul of the appropriate master mix+TransIT-X2 is added to duplicate wells of HepG2 cells with a final siRNA concentration of 10 nM.

[0401] On Day 4, 72 hours post transfection, the cells are lysed using the Cells-to-Ct kit according to the manufacturer's protocol (ThermoFisher Cat. No. 4399002). For the Cells-to-Ct protocol, cells are washed with 50 ul using cold 1×PBS and lysed by adding 49.5 ul of Lysis Solution and 0.5 ul DNase I per well and pipetting up and down 5 times and incubating for 5 minutes at room temperature. The Stop Solution (5 ul/well) is added to each well and mixed by pipetting up and down five times and incubating at room temperature for 2 minutes. The reverse transcriptase reaction is performed using 22.5 ul of the lysate according to the manufacturer's protocol. Samples are stored at −80° C. until real-time qPCR is performed in triplicate using TaqMan Gene Expression Assays (Applied Biosystems FAM/SOS2 using a BioRad CFX96 Cat. No. 1855195). For the protein quantification, equivalent quantities (30-50 μg) of protein are separated by 10% SDS polyacrylamide gels and transferred to polyvinylidene fluoride membranes. Membranes are blocked with 5% nonfat milk and incubated overnight with the appropriate primary antibody at dilutions specified by the manufacturer. Next, the membranes are washed three times in TBST and incubated with the corresponding horseradish peroxidase conjugated secondary antibody at 1:5,000 dilution for 1 hr. Bound secondary antibody is detected using an enhanced chemiluminescence system. Primary immunoblotting antibodies are: anti-GAPDH, anti-RAC1, anti-GTP-RAC1 (Sigma, MO) and anti-SOS2 (Abcam, Cambridge, UK).

[0402] A decrease in SOS2 mRNA expression in the HepG2 cells is expected after transfection with the SOS2 siRNAs compared to SOS2 mRNA levels in HepG2 cells transfected with the non-specific control siRNA 72 hours after transfection. There is an expected decrease in the amount of activated RAC1, measured by quantifying the amount of GTP bound RAC1 versus total RAC1 in HepG2 cells transfected with the SOS2 siRNAs relative to the amount of GTP bound RAC1 versus total RAC1 in HepG2 cells transfected with a non-specific control siRNA 72 hours after transfection. These results show that the SOS2 siRNAs elicit knockdown of SOS2 mRNA in HepG2 cells and that the decrease in SOS2 expression is correlated with a decrease in activated RAC1.

### Example 5: ASO-Mediated Knockdown of SOS2 in HepG2 Cell Line

[0403] ASOs targeted to the SOS2 mRNA that downregulate levels of SOS2 mRNA leading to a decrease in RAC1 protein activation, when administered to the cultured human hepatocyte cell line, HepG2.

[0404] On Day 0, the HepG2 cells are seeded at 150,000 cells/mL into a Falcon 24-well tissue culture plate (ThermoFisher Cat. No. 353047) at 0.5 mL per well.

[0405] On Day 1, the SOS2 ASO and negative control ASO master mixes are prepared. The SOS2 siRNA master mix contains 350 uL of Opti-MEM (ThermoFisher Cat. No. 4427037-s1288 Lot No. AS02B02D) and 3.5 ul of a mixture of two SOS2 ASOs (10 uM stock). The negative control siRNA master mix contains 350 uL of Opti-MEM and 3.5 ul of negative control ASO (ThermoFisher, 10 uM stock). Next, 3 uL of TransIT-X2 (Mirus Cat. No. MIR-6000) is added to each master mix. The mixes are incubated for 15 minutes to allow transfection complexes to form, then 51 ul of the appropriate master mix+TransIT-X2 is added to duplicate wells of HepG2 cells with a final ASO concentration of 10 nM.

[0406] On Day 4, 72 hours post transfection, the cells are lysed using the Cells-to-Ct kit according to the manufacturer's protocol (ThermoFisher Cat. No. 4399002). For the Cells-to-Ct protocol, cells are washed with 50 ul using cold 1×PBS and lysed by adding 49.5 ul of Lysis Solution and 0.5 ul DNase I per well and pipetting up and down 5 times and incubating for 5 minutes at room temperature. The Stop Solution (5 ul/well) is added to each well and mixed by pipetting up and down five times and incubating at room temperature for 2 minutes. The reverse transcriptase reaction is performed using 22.5 ul of the lysate according to the manufacturer's protocol. Samples are stored at −80° C. until real-time qPCR is performed in triplicate using TaqMan Gene Expression Assays (Applied Biosystems FAM/SOS2 using a BioRad CFX96 Cat. No. 1855195). For the protein quantification, equivalent quantities (30-50 μg) of protein are separated by 10% SDS polyacrylamide gels and transferred to polyvinylidene fluoride membranes. Membranes are blocked with 5% nonfat milk and incubated overnight with the appropriate primary antibody at dilutions specified by the manufacturer. Next, the membranes are washed three times in TBST and incubated with the corresponding horseradish peroxidase conjugated secondary antibody at 1:5,000 dilution for 1 hr. Bound secondary antibody is detected using an enhanced chemiluminescence system. Primary immunoblotting antibodies are: anti-GAPDH, anti-RAC1, anti-GTP-RAC1 (Sigma, MO) and anti-SOS2 (Abcam, Cambridge, UK).

[0407] A decrease in SOS2 mRNA expression in the HepG2 cells is expected after transfection with the SOS2 ASOs compared to SOS2 mRNA levels in HepG2 cells transfected with the non-specific control ASO 72 hours after transfection. There is an expected decrease in the amount of activated RAC1, measured by quantifying the amount of GTP bound RAC1 versus total RAC1 in HepG2 cells transfected with the SOS2 ASOs relative to the amount of GTP bound RAC1 versus total RAC1 in HepG2 cells transfected with a non-specific control ASO 72 hours after transfection. These results show that the SOS2 ASOs elicit knockdown of SOS2 mRNA in HepG2 cells and that the decrease in SOS2 expression is correlated with a decrease in activated RAC1.

### Example 6: Inhibition of SOS2 in a Mouse Model for Chronic Kidney Disease Using SOS2 siRNAs or ASOs

[0408] In this experiment, a mouse model of chronic kidney disease (CKD) will be used to evaluate the effect of siRNA or ASO inhibition of SOS2. The chronic kidney disease model involves temporarily occluding blood flow to both kidneys in 12-week-old C57BL mice. Kidney function is monitored by measuring serum creatinine, blood urea nitrogen, and urine albumin.

[0409] Mice will be divided into five groups: Group 1—a group treated with non-targeting control siRNA, Group 2—a group treated with non-targeting control ASO, Group 3—a group treated with SOS2 siRNA1, Group 4—a group treated with SOS2 ASO1, Group 5—a group treated with vehicle. Each group will include eight mice (4 males, 4 females).

[0410] Administration of siRNA or ASO will be achieved with a 100 ul subcutaneous injection of siRNA or ASO resuspended in PBS at concentration of 10 uM. On Study Day 0, Group 1 are be injected subcutaneously with non-targeting control siRNA, Group 2 mice are injected subcutaneously with non-targeting control ASO, Group 3 mice are injected subcutaneously with siRNA1 targeting mouse SOS2, Group 4 mice are injected subcutaneously with ASO1 targeting mouse SOS2, and Group 5 mice are injected subcutaneously with vehicle. Every 7 days after the first injection animals from each group are dosed for a total of 2 injections. Blood and urine samples are taken every other day and urine collected for a 24 hr period weekly; serum creatinine, blood urea nitrogen, blood uric acid and urine albumin are measured.

[0411] 14 days after the ischemia reperfusion surgery to induce the chronic kidney disease like phenotype, the mice will be sacrificed by cervical dislocation following an intraperitoneal injection of 0.3 ml Nembutal (5 mg/ml) (Sigma Cat. No. 1507002). Final blood and urine samples are collected, and kidneys are removed and placed in RNAlater for mRNA isolation.

[0412] mRNA will be isolated from tissue placed in RNAlater solution using the PureLink kit according to the manufacturer's protocol (ThermoFisher Cat. No. 12183020). The reverse transcriptase reaction is performed according to the manufacturer's protocol. Samples are stored at −80° C. until real-time qPCR is performed in triplicate using TaqMan Gene Expression Assays (Applied Biosystems FAM/SOS2 using a BioRad CFX96 Cat. No. 1855195). A decrease in SOS2 mRNA expression in the kidney tissue from mice dosed with the SOS2 siRNA1 or ASO1 is expected compared to SOS2 mRNA levels in the kidney tissue from mice dosed with the non-specific controls. There is an expected decrease in serum creatinine, urea nitrogen, albumin, and urate in mice that receive the SOS2 siRNA or ASO compared to the serum creatinine, urea nitrogen, albumin, and urate in mice that receive the non-specific control. These results are expected to show that the SOS2 siRNA or ASO elicit knockdown of SOS2 mRNA in kidney tissue and that the decrease in SOS2 expression is correlated with a decrease in serum creatinine, blood urea nitrogen, and urine albumin.

### Example 7: Inhibition of SOS2 in a Mouse Model for Hyperuricemia-Induced Chronic Kidney Disease Using SOS2 siRNAs or ASOs

[0413] In this experiment, a mouse model of hyperuricemia-induced chronic kidney disease will be used to evaluate the effect of siRNA or ASO inhibition of SOS2. The hyperuricemia-induced chronic kidney disease model is induced by gavage of a mixture of adenine (160 mg/kg/d) and potassium oxonate (2400 mg/kg/d) (Sigma-Aldrich, St. Louis, MO) dissolved in 200 μL double distilled water daily consistently for 3 weeks in C57BL/6 mice (8-10 weeks of age weighing 25-27 g). Kidney function is monitored by measuring serum creatinine, blood urea nitrogen, blood uric acid and urine albumin.

[0414] 3 hours after model induction, mice will be divided into five groups: Group 1—a group treated with non-targeting control siRNA, Group 2—a group treated with non-targeting control ASO, Group 3—a group treated with SOS2 siRNA1, Group 4—a group treated with SOS2 ASO1, Group 5—a group treated with vehicle. Each group contains eight mice (4 males, 4 females).

[0415] 21 days after the model induction, the mice will be sacrificed by cervical dislocation following an intraperitoneal injection of 0.3 ml Nembutal (5 mg/ml) (Sigma Cat. No. 1507002). Final blood and urine samples are collected, and kidneys are removed and placed in RNAlater for mRNA isolation.

[0416] mRNA will be isolated from tissue placed in RNAlater solution using the PureLink kit according to the manufacturer's protocol (ThermoFisher Cat. No. 12183020). The reverse transcriptase reaction is performed according to the manufacturer's protocol. Samples are stored at −80° C. until real-time qPCR was performed in triplicate using TaqMan Gene Expression Assays (Applied Biosystems FAM/SOS2 using a BioRad CFX96 Cat. No. 1855195). A decrease in SOS2 mRNA expression in the kidney tissue from mice dosed with the SOS2 siRNA1 or ASO1 is expected compared to SOS2 mRNA levels in the kidney tissue from mice dosed with the non-specific controls. There is an expected decrease in serum creatinine, blood urea nitrogen, blood uric acid and urine albumin in mice that receive the SOS2 siRNA or ASO compared to the serum creatinine, blood urea nitrogen, blood uric acid and urine albumin in mice that receive the non-specific control. These results are expected to show that the SOS2 siRNA or ASO elicit knockdown of SOS2 mRNA in kidney tissue and that the decrease in SOS2 expression is correlated with a decrease in serum creatinine, blood urea nitrogen, blood uric acid and urine albumin.

### Example 8: Inhibition of SOS2 in a Mouse Model of Glaucoma Using SOS2 siRNAs or ASOs

[0417] In this experiment, a mouse model of glaucoma will be used to evaluate the effect of siRNA or ASO inhibition of SOS2. The glaucoma model involves injection of adenovirus expressing TGF-B into the vitreous fluid of the eyes of C57BL mice. Glaucoma like conditions are monitored by measuring intra-ocular pressure (IOP) of the eyes of mice treated with the adenovirus expressing TGF-B.

[0418] Mice will be divided into five groups: Group 1—a group treated with non-targeting control siRNA, Group 2—a group treated with non-targeting control ASO, Group 3—a group treated with SOS2 siRNA1, Group 4—a group treated with SOS2 ASO1, Group 5—a group treated with vehicle. Each group contains eight mice (4 males, 4 females).

[0419] Administration of siRNA or ASO will be achieved with a 2 ul intravitreal injection of siRNA or ASO resuspended in PBS at concentration of 10 uM. On Study Day 0, Group 1 mice are injected intravitreally with non-targeting control siRNA, Group 2 mice are injected intravitreally with non-targeting control ASO, Group 3 mice are injected intravitreally with siRNA1 targeting mouse SOS2, Group 4 mice are injected intravitreally with ASO1 targeting mouse SOS2, and Group 5 mice are injected intravitreally with vehicle. Every 7 days after the first injection animals from each group will be dosed for a total of 2 injections. IOP measurement are taken every other day.

[0420] 14 days after the first injection of siRNA or ASO, the mice will be sacrificed by cervical dislocation following an intraperitoneal injection of 0.3 ml Nembutal (5 mg/ml) (Sigma Cat. No. 1507002). Eyes are removed and placed in RNAlater for mRNA isolation.

[0421] mRNA will be isolated from tissue placed in RNAlater solution using the PureLink kit according to the manufacturer's protocol (ThermoFisher Cat. No. 12183020). The reverse transcriptase reaction is performed according to the manufacturer's protocol. Samples are stored at −80° C. until real-time qPCR was performed in triplicate using TaqMan Gene Expression Assays (Applied Biosystems FAM/SOS2 using a BioRad CFX96 Cat. No. 1855195). A decrease in SOS2 mRNA expression in the eye tissue from mice dosed with the SOS2 siRNA1 or ASO1 is expected compared to SOS2 mRNA levels in the eye tissue from mice dosed with the non-specific controls. There is an expected decrease in IOP in mice that receive the SOS2 siRNA or ASO compared to the IOP in mice that receive the non-specific control. These results are expected to show that the SOS2 siRNA or ASO elicit knockdown of SOS2 mRNA in eye tissue and that the decrease in SOS2 expression is correlated with a decrease in IOP.

### Example 9: Inhibition of SOS2 in a Mouse Model for NASH/NAFLD Using SOS2 siRNAs or ASOs

[0422] In this experiment, a mouse model of NASH/NAFLD will be used to evaluate the effect of siRNA or ASO inhibition of SOS2. The NASH/NAFLD disease model mice are fed a high fructose, high fat, high cholesterol diet in ob/ob mice for 12 weeks prior to treatment. Liver function, glucose homeostasis and obesity are monitored by measuring blood glucose, ALT, insulin, blood lipids and body weight.

[0423] Mice will be divided into five groups: Group 1—a group treated with non-targeting control siRNA, Group 2—a group treated with non-targeting control ASO, Group 3—a group treated with SOS2 siRNA1, Group 4—a group treated with SOS2 ASO1, Group 5—a group treated with vehicle. Each group contains eight mice (4 males, 4 females).

[0424] Administration of siRNA or ASO will be achieved with a 100 ul subcutaneous injection of siRNA or ASO resuspended in PBS at concentration of 10 uM. On Study Day 0, Group 1 mice are injected subcutaneously with non-targeting control siRNA, Group 2 mice are injected subcutaneously with non-targeting control ASO, Group 3 mice are injected subcutaneously with siRNA1 targeting mouse SOS2, Group 4 mice are injected subcutaneously with ASO1 targeting mouse SOS2, and Group 5 mice are injected subcutaneously with vehicle. Every 7 days after the first injection animals from each group will be dosed for a total of 3 injections. Body weights are measured, and blood samples are taken twice per week; blood glucose, ALT, insulin, and lipids are measured.

[0425] 6 weeks after the treatment, the mice will be sacrificed by cervical dislocation following an intraperitoneal injection of 0.3 ml Nembutal (5 mg/ml) (Sigma Cat. No. 1507002). Final blood samples are collected, and livers and adipose tissue are removed, and a section placed in RNAlater for mRNA isolation or neutral buffered formalin for histopathology.

[0426] mRNA will be isolated from tissue placed in RNAlater solution using the PureLink kit according to the manufacturer's protocol (ThermoFisher Cat. No. 12183020). The reverse transcriptase reaction is performed according to the manufacturer's protocol. Samples are stored at −80° C. until real-time qPCR is performed in triplicate using TaqMan Gene Expression Assays (Applied Biosystems FAM/SOS2 using a BioRad CFX96 Cat. No. 1855195). A decrease in SOS2 mRNA expression in the liver and adipose tissue from mice dosed with the SOS2 siRNA1 or ASO1 is expected compared to SOS2 mRNA levels in the liver and adipose tissue from mice dosed with the non-specific controls. There is an expected decrease in body weight, blood glucose, ALT, insulin, and lipids in mice that receive the SOS2 siRNA or ASO compared to the body weight, blood glucose, ALT, insulin, and lipids in mice that receive the non-specific control. These results are expected to show that the SOS2 siRNA or ASO elicit knockdown of SOS2 mRNA in liver tissue and that the decrease in SOS2 expression is correlated with a decrease in body weight, blood glucose, ALT, insulin, and lipids.

[0427] Additionally, liver sections placed in the neutral buffered formalin will be embedded into paraffin and sectioned onto slide. The slide from both treated and non-treated mice are then assessed by histopathology using semi-quantitative scoring system (H&E/Picrosirius Red). There is an expected decrease in histopathology fatty liver and fibrosis scoring in mice that receive the SOS2 siRNA or ASO compared to the histopathology fatty liver and fibrosis scoring in mice that receive the non-specific control. These are expected to results show that the SOS2 siRNA or ASO elicit knockdown of SOS2 mRNA in liver tissue and that the decrease in SOS2 expression is correlated with a decrease in histopathology fatty liver and fibrosis scoring.

### Example 10: Bioinformatic Selection of Sequences in Order to Identify Therapeutic siRNAs to Downmodulate Expression of the SOS2 mRNA

[0428] Screening sets were defined based on bioinformatic analysis. Therapeutic siRNAs were designed to target human SOS2. Predicted specificity in human, rhesus monkey, cynomolgus monkey, mouse, rat, rabbit, and dog was determined for sense (S) and antisense (AS) strands. These were assigned a “specificity score” which considers the likelihood of unintended downregulation of any other transcript by full or partial complementarity of an siRNA strand (up to 2 mismatches within positions 2-18) as well as the number and positions of mismatches. Thus, off-target(s) transcripts for antisense and sense strands of each siRNA were identified. As identified, siRNAs with high specificity and a low number of predicted off-targets provided a benefit of increased targeting specificity.

[0429] In addition to selecting siRNA sequences with high sequence specificity to SOS2 mRNA, siRNA sequences within the seed region were analyzed for similarity to seed regions of known miRNAs. siRNAs can function in a miRNA like manner via base-pairing with complementary sequences within the 3′-UTR of mRNA molecules. The complementarity typically encompasses the 5′-bases at positions 2-7 of the miRNA (seed region). To circumvent siRNAs to act via functional miRNA binding sites, siRNA strands containing natural miRNA seed regions can be avoided. Seed regions identified in miRNAs from human, mouse, rat, rhesus monkey, dog, rabbit, and pig are referred to as “conserved”. Combining the “specificity score” with miRNA seed analysis yielded a “specificity category”. This is divided into categories 1-4, with 1 having the highest specificity and 4 having the lowest specificity. Each strand of the siRNA is assigned to a specificity category.

[0430] Analysis of the Genome Aggregation Database (gnomAD) to identify siRNAs targeting regions with known SNPs was also carried out to identify siRNAs that may be non-functional in individuals containing the SNP. Information regarding the positions of SNPs within the target sequence as well as minor allele frequency (MAF) in case data was obtained in this analysis.

[0431] Initial analysis of the relevant SOS2 mRNA sequence revealed few sequences that fulfil the specificity parameters and at the same time target SOS2 mRNA in all the analyzed relevant species. Therefore, independent screening subsets were designed for the therapeutic siRNAs.

[0432] The siRNAs in these subsets recognized at least the human SOS2 sequences. Therefore, the siRNAs in these subsets can be used to target human SOS2 in a therapeutic setting.

[0433] The number of siRNA sequences derived from human SOS2 mRNA (ENST00000216373.10; SEQ ID NO: 11253) without consideration of specificity or species cross-reactivity was 5490 (sense and antisense strand sequences included in SEQ ID NOS: 1-5490 and 5491-10980, respectively)

[0434] Prioritizing sequences for target specificity, absence of miRNA seed region sequences and SNPs as described above yields subset A. Subset A contains 1126 siRNAs whose base sequences are shown in Table 15.

TABLE 15
Subset A

| | Sense | Antisense |
|---|---|---|
| siRNA Name | SEQ ID NO: | SEQ ID NO: |
| siRNA 47 | 47 | 5537 |
| siRNA 52 | 52 | 5542 |
| siRNA 53 | 53 | 5543 |
| siRNA 72 | 72 | 5562 |
| siRNA 105 | 105 | 5595 |
| siRNA 106 | 106 | 5596 |
| siRNA 108 | 108 | 5598 |
| siRNA 115 | 115 | 5605 |
| siRNA 129 | 129 | 5619 |
| siRNA 158 | 158 | 5648 |
| siRNA 159 | 159 | 5649 |
| siRNA 160 | 160 | 5650 |
| siRNA 164 | 164 | 5654 |
| siRNA 165 | 165 | 5655 |
| siRNA 200 | 200 | 5690 |
| siRNA 224 | 224 | 5714 |
| siRNA 233 | 233 | 5723 |
| siRNA 234 | 234 | 5724 |
| siRNA 236 | 236 | 5726 |
| siRNA 258 | 258 | 5748 |
| siRNA 266 | 266 | 5756 |
| siRNA 275 | 275 | 5765 |
| siRNA 281 | 281 | 5771 |
| siRNA 282 | 282 | 5772 |
| siRNA 301 | 301 | 5791 |
| siRNA 303 | 303 | 5793 |
| siRNA 305 | 305 | 5795 |
| siRNA 308 | 308 | 5798 |
| siRNA 310 | 310 | 5800 |
| siRNA 313 | 313 | 5803 |
| siRNA 315 | 315 | 5805 |
| siRNA 317 | 317 | 5807 |
| siRNA 323 | 323 | 5813 |
| siRNA 326 | 326 | 5816 |
| siRNA 331 | 331 | 5821 |
| siRNA 332 | 332 | 5822 |
| siRNA 336 | 336 | 5826 |
| siRNA 338 | 338 | 5828 |
| siRNA 341 | 341 | 5831 |
| siRNA 342 | 342 | 5832 |
| siRNA 347 | 347 | 5837 |
| siRNA 350 | 350 | 5840 |
| siRNA 351 | 351 | 5841 |
| siRNA 352 | 352 | 5842 |
| siRNA 353 | 353 | 5843 |
| siRNA 354 | 354 | 5844 |
| siRNA 356 | 356 | 5846 |
| siRNA 357 | 357 | 5847 |
| siRNA 364 | 364 | 5854 |
| siRNA 368 | 368 | 5858 |
| siRNA 370 | 370 | 5860 |
| siRNA 375 | 375 | 5865 |
| siRNA 376 | 376 | 5866 |
| siRNA 381 | 381 | 5871 |
| siRNA 394 | 394 | 5884 |
| siRNA 400 | 400 | 5890 |
| siRNA 403 | 403 | 5893 |
| siRNA 404 | 404 | 5894 |
| siRNA 405 | 405 | 5895 |
| siRNA 407 | 407 | 5897 |
| siRNA 415 | 415 | 5905 |
| siRNA 416 | 416 | 5906 |
| siRNA 422 | 422 | 5912 |
| siRNA 424 | 424 | 5914 |
| siRNA 428 | 428 | 5918 |
| siRNA 436 | 436 | 5926 |
| siRNA 457 | 457 | 5947 |
| siRNA 462 | 462 | 5952 |
| siRNA 463 | 463 | 5953 |
| siRNA 464 | 464 | 5954 |
| siRNA 465 | 465 | 5955 |
| siRNA 468 | 468 | 5958 |
| siRNA 482 | 482 | 5972 |
| siRNA 488 | 488 | 5978 |
| siRNA 493 | 493 | 5983 |
| siRNA 494 | 494 | 5984 |
| siRNA 509 | 509 | 5999 |
| siRNA 510 | 510 | 6000 |
| siRNA 514 | 514 | 6004 |
| siRNA 523 | 523 | 6013 |
| siRNA 526 | 526 | 6016 |
| siRNA 528 | 528 | 6018 |
| siRNA 536 | 536 | 6026 |
| siRNA 538 | 538 | 6028 |
| siRNA 539 | 539 | 6029 |
| siRNA 541 | 541 | 6031 |
| siRNA 542 | 542 | 6032 |
| siRNA 546 | 546 | 6036 |
| siRNA 547 | 547 | 6037 |
| siRNA 552 | 552 | 6042 |
| siRNA 556 | 556 | 6046 |
| siRNA 558 | 558 | 6048 |
| siRNA 562 | 562 | 6052 |
| siRNA 570 | 570 | 6060 |
| siRNA 573 | 573 | 6063 |
| siRNA 574 | 574 | 6064 |
| siRNA 575 | 575 | 6065 |
| siRNA 585 | 585 | 6075 |
| siRNA 587 | 587 | 6077 |
| siRNA 589 | 589 | 6079 |
| siRNA 596 | 596 | 6086 |
| siRNA 602 | 602 | 6092 |
| siRNA 614 | 614 | 6104 |
| siRNA 617 | 617 | 6107 |
| siRNA 619 | 619 | 6109 |
| siRNA 620 | 620 | 6110 |
| siRNA 621 | 621 | 6111 |
| siRNA 622 | 622 | 6112 |
| siRNA 623 | 623 | 6113 |
| siRNA 625 | 625 | 6115 |
| siRNA 627 | 627 | 6117 |
| siRNA 632 | 632 | 6122 |
| siRNA 633 | 633 | 6123 |
| siRNA 637 | 637 | 6127 |
| siRNA 638 | 638 | 6128 |
| siRNA 639 | 639 | 6129 |
| siRNA 640 | 640 | 6130 |
| siRNA 643 | 643 | 6133 |
| siRNA 644 | 644 | 6134 |
| siRNA 647 | 647 | 6137 |
| siRNA 650 | 650 | 6140 |
| siRNA 651 | 651 | 6141 |
| siRNA 652 | 652 | 6142 |
| siRNA 653 | 653 | 6143 |
| siRNA 656 | 656 | 6146 |
| siRNA 657 | 657 | 6147 |
| siRNA 660 | 660 | 6150 |
| siRNA 662 | 662 | 6152 |
| siRNA 663 | 663 | 6153 |
| siRNA 664 | 664 | 6154 |
| siRNA 665 | 665 | 6155 |
| siRNA 666 | 666 | 6156 |
| siRNA 671 | 671 | 6161 |
| siRNA 674 | 674 | 6164 |
| siRNA 678 | 678 | 6168 |
| siRNA 679 | 679 | 6169 |
| siRNA 680 | 680 | 6170 |
| siRNA 682 | 682 | 6172 |
| siRNA 683 | 683 | 6173 |
| siRNA 685 | 685 | 6175 |
| siRNA 689 | 689 | 6179 |
| siRNA 690 | 690 | 6180 |
| siRNA 691 | 691 | 6181 |
| siRNA 692 | 692 | 6182 |
| siRNA 719 | 719 | 6209 |
| siRNA 736 | 736 | 6226 |
| siRNA 737 | 737 | 6227 |
| siRNA 738 | 738 | 6228 |
| siRNA 739 | 739 | 6229 |
| siRNA 740 | 740 | 6230 |
| siRNA 743 | 743 | 6233 |
| siRNA 744 | 744 | 6234 |
| siRNA 749 | 749 | 6239 |
| siRNA 750 | 750 | 6240 |
| siRNA 763 | 763 | 6253 |
| siRNA 764 | 764 | 6254 |
| siRNA 766 | 766 | 6256 |
| siRNA 771 | 771 | 6261 |
| siRNA 772 | 772 | 6262 |
| siRNA 782 | 782 | 6272 |
| siRNA 783 | 783 | 6273 |
| siRNA 784 | 784 | 6274 |
| siRNA 785 | 785 | 6275 |
| siRNA 786 | 786 | 6276 |
| siRNA 787 | 787 | 6277 |
| siRNA 788 | 788 | 6278 |
| siRNA 789 | 789 | 6279 |
| siRNA 792 | 792 | 6282 |
| siRNA 795 | 795 | 6285 |
| siRNA 796 | 796 | 6286 |
| siRNA 797 | 797 | 6287 |
| siRNA 810 | 810 | 6300 |
| siRNA 813 | 813 | 6303 |
| siRNA 818 | 818 | 6308 |
| siRNA 819 | 819 | 6309 |
| siRNA 831 | 831 | 6321 |
| siRNA 853 | 853 | 6343 |
| siRNA 854 | 854 | 6344 |
| siRNA 856 | 856 | 6346 |
| siRNA 857 | 857 | 6347 |
| siRNA 858 | 858 | 6348 |
| siRNA 859 | 859 | 6349 |
| siRNA 872 | 872 | 6362 |
| siRNA 876 | 876 | 6366 |
| siRNA 877 | 877 | 6367 |
| siRNA 884 | 884 | 6374 |
| siRNA 887 | 887 | 6377 |
| siRNA 888 | 888 | 6378 |
| siRNA 889 | 889 | 6379 |
| siRNA 890 | 890 | 6380 |
| siRNA 894 | 894 | 6384 |
| siRNA 922 | 922 | 6412 |
| siRNA 924 | 924 | 6414 |
| siRNA 925 | 925 | 6415 |
| siRNA 926 | 926 | 6416 |
| siRNA 928 | 928 | 6418 |
| siRNA 930 | 930 | 6420 |
| siRNA 933 | 933 | 6423 |
| siRNA 934 | 934 | 6424 |
| siRNA 935 | 935 | 6425 |
| siRNA 936 | 936 | 6426 |
| siRNA 938 | 938 | 6428 |
| siRNA 941 | 941 | 6431 |
| siRNA 942 | 942 | 6432 |
| siRNA 953 | 953 | 6443 |
| siRNA 954 | 954 | 6444 |
| siRNA 959 | 959 | 6449 |
| siRNA 961 | 961 | 6451 |
| siRNA 967 | 967 | 6457 |
| siRNA 973 | 973 | 6463 |
| siRNA 981 | 981 | 6471 |
| siRNA 999 | 999 | 6489 |
| siRNA 1000 | 1000 | 6490 |
| siRNA 1001 | 1001 | 6491 |
| siRNA 1004 | 1004 | 6494 |
| siRNA 1006 | 1006 | 6496 |
| siRNA 1007 | 1007 | 6497 |
| siRNA 1036 | 1036 | 6526 |
| siRNA 1040 | 1040 | 6530 |
| siRNA 1050 | 1050 | 6540 |
| siRNA 1052 | 1052 | 6542 |
| siRNA 1053 | 1053 | 6543 |
| siRNA 1054 | 1054 | 6544 |
| siRNA 1056 | 1056 | 6546 |
| siRNA 1062 | 1062 | 6552 |
| siRNA 1067 | 1067 | 6557 |
| siRNA 1072 | 1072 | 6562 |
| siRNA 1075 | 1075 | 6565 |
| siRNA 1082 | 1082 | 6572 |
| siRNA 1084 | 1084 | 6574 |
| siRNA 1085 | 1085 | 6575 |
| siRNA 1086 | 1086 | 6576 |
| siRNA 1087 | 1087 | 6577 |
| siRNA 1134 | 1134 | 6624 |
| siRNA 1153 | 1153 | 6643 |
| siRNA 1154 | 1154 | 6644 |
| siRNA 1155 | 1155 | 6645 |
| siRNA 1156 | 1156 | 6646 |
| siRNA 1157 | 1157 | 6647 |
| siRNA 1158 | 1158 | 6648 |
| siRNA 1159 | 1159 | 6649 |
| siRNA 1175 | 1175 | 6665 |
| siRNA 1178 | 1178 | 6668 |
| siRNA 1185 | 1185 | 6675 |
| siRNA 1187 | 1187 | 6677 |
| siRNA 1191 | 1191 | 6681 |
| siRNA 1192 | 1192 | 6682 |
| siRNA 1196 | 1196 | 6686 |
| siRNA 1224 | 1224 | 6714 |
| siRNA 1242 | 1242 | 6732 |
| siRNA 1248 | 1248 | 6738 |
| siRNA 1249 | 1249 | 6739 |
| siRNA 1250 | 1250 | 6740 |
| siRNA 1251 | 1251 | 6741 |
| siRNA 1255 | 1255 | 6745 |
| siRNA 1279 | 1279 | 6769 |
| siRNA 1280 | 1280 | 5770 |
| siRNA 1282 | 1282 | 6772 |
| siRNA 1286 | 1286 | 6776 |
| siRNA 1288 | 1288 | 6778 |
| siRNA 1294 | 1294 | 6784 |
| siRNA 1296 | 1296 | 6786 |
| siRNA 1301 | 1301 | 6791 |
| siRNA 1302 | 1302 | 6792 |
| siRNA 1303 | 1303 | 6793 |
| siRNA 1304 | 1304 | 6794 |
| siRNA 1307 | 1307 | 6797 |
| siRNA 1309 | 1309 | 6799 |
| siRNA 1318 | 1318 | 6808 |
| siRNA 1319 | 1319 | 6809 |
| siRNA 1320 | 1320 | 6810 |
| siRNA 1321 | 1321 | 6811 |
| siRNA 1322 | 1322 | 6812 |
| siRNA 1326 | 1326 | 6816 |
| siRNA 1333 | 1333 | 6823 |
| siRNA 1339 | 1339 | 6829 |
| siRNA 1340 | 1340 | 6830 |
| siRNA 1342 | 1342 | 6832 |
| siRNA 1343 | 1343 | 6833 |
| siRNA 1344 | 1344 | 6834 |
| siRNA 1346 | 1346 | 6836 |
| siRNA 1347 | 1347 | 6837 |
| siRNA 1351 | 1351 | 6841 |
| siRNA 1357 | 1357 | 6847 |
| siRNA 1363 | 1363 | 6853 |
| siRNA 1365 | 1365 | 6855 |
| siRNA 1372 | 1372 | 6862 |
| siRNA 1395 | 1395 | 6885 |
| siRNA 1398 | 1398 | 6888 |
| siRNA 1405 | 1405 | 6895 |
| siRNA 1406 | 1406 | 6896 |
| siRNA 1408 | 1408 | 6898 |
| siRNA 1410 | 1410 | 6900 |
| siRNA 1411 | 1411 | 6901 |
| siRNA 1422 | 1422 | 6912 |
| siRNA 1430 | 1430 | 6920 |
| siRNA 1431 | 1431 | 6921 |
| siRNA 1434 | 1434 | 6924 |
| siRNA 1435 | 1435 | 6925 |
| siRNA 1441 | 1441 | 6931 |
| siRNA 1442 | 1442 | 6932 |
| siRNA 1445 | 1445 | 6935 |
| siRNA 1448 | 1448 | 6938 |
| siRNA 1449 | 1449 | 6939 |
| siRNA 1452 | 1452 | 6942 |
| siRNA 1453 | 1453 | 6943 |
| siRNA 1459 | 1459 | 6949 |
| siRNA 1460 | 1460 | 6950 |
| siRNA 1461 | 1461 | 6951 |
| siRNA 1462 | 1462 | 6952 |
| siRNA 1463 | 1463 | 6953 |
| siRNA 1465 | 1465 | 6955 |
| siRNA 1466 | 1466 | 6956 |
| siRNA 1467 | 1467 | 6957 |
| siRNA 1468 | 1468 | 6958 |
| siRNA 1469 | 1469 | 6959 |
| siRNA 1470 | 1470 | 6960 |
| siRNA 1472 | 1472 | 6962 |
| siRNA 1473 | 1473 | 6963 |
| siRNA 1474 | 1474 | 6964 |
| siRNA 1475 | 1475 | 6965 |
| siRNA 1476 | 1476 | 6966 |
| siRNA 1477 | 1477 | 6967 |
| siRNA 1481 | 1481 | 6971 |
| siRNA 1494 | 1494 | 6984 |
| siRNA 1495 | 1495 | 6985 |
| siRNA 1498 | 1498 | 6988 |
| siRNA 1503 | 1503 | 6993 |
| siRNA 1504 | 1504 | 6994 |
| siRNA 1505 | 1505 | 6995 |
| siRNA 1510 | 1510 | 7000 |
| siRNA 1521 | 1521 | 7011 |
| siRNA 1529 | 1529 | 7019 |
| siRNA 1533 | 1533 | 7023 |
| siRNA 1535 | 1535 | 7025 |
| siRNA 1560 | 1560 | 7050 |
| siRNA 1568 | 1568 | 7058 |
| siRNA 1569 | 1569 | 7059 |
| siRNA 1570 | 1570 | 7060 |
| siRNA 1572 | 1572 | 7062 |
| siRNA 1575 | 1575 | 7065 |
| siRNA 1587 | 1587 | 7077 |
| siRNA 1588 | 1588 | 7078 |
| siRNA 1589 | 1589 | 7079 |
| siRNA 1596 | 1596 | 7086 |
| siRNA 1614 | 1614 | 7104 |
| siRNA 1616 | 1616 | 7106 |
| siRNA 1621 | 1621 | 7111 |
| siRNA 1622 | 1622 | 7112 |
| siRNA 1623 | 1623 | 7113 |
| siRNA 1627 | 1627 | 7117 |
| siRNA 1628 | 1628 | 7118 |
| siRNA 1631 | 1631 | 7121 |
| siRNA 1632 | 1632 | 7122 |
| siRNA 1633 | 1633 | 7123 |
| siRNA 1634 | 1634 | 7124 |
| siRNA 1635 | 1635 | 7125 |
| siRNA 1636 | 1636 | 7126 |
| siRNA 1637 | 1637 | 7127 |
| siRNA 1638 | 1638 | 7128 |
| siRNA 1641 | 1641 | 7131 |
| siRNA 1643 | 1643 | 7133 |
| siRNA 1644 | 1644 | 7134 |
| siRNA 1645 | 1645 | 7135 |
| siRNA 1648 | 1648 | 7138 |
| siRNA 1649 | 1649 | 7139 |
| siRNA 1650 | 1650 | 7140 |
| siRNA 1651 | 1651 | 7141 |
| siRNA 1652 | 1652 | 7142 |
| siRNA 1654 | 1654 | 7144 |
| siRNA 1655 | 1655 | 7145 |
| siRNA 1656 | 1656 | 7146 |
| siRNA 1658 | 1658 | 7148 |
| siRNA 1659 | 1659 | 7149 |
| siRNA 1683 | 1683 | 7173 |
| siRNA 1684 | 1684 | 7174 |
| siRNA 1689 | 1689 | 7179 |
| siRNA 1691 | 1691 | 7181 |
| siRNA 1693 | 1693 | 7183 |
| siRNA 1697 | 1697 | 7187 |
| siRNA 1699 | 1699 | 7189 |
| siRNA 1703 | 1703 | 7193 |
| siRNA 1706 | 1706 | 7196 |
| siRNA 1707 | 1707 | 7197 |
| siRNA 1708 | 1708 | 7198 |
| siRNA 1712 | 1712 | 7202 |
| siRNA 1720 | 1720 | 7210 |
| siRNA 1763 | 1763 | 7253 |
| siRNA 1802 | 1802 | 7292 |
| siRNA 1805 | 1805 | 7295 |
| siRNA 1806 | 1806 | 7296 |
| siRNA 1811 | 1811 | 7301 |
| siRNA 1812 | 1812 | 7302 |
| siRNA 1814 | 1814 | 7304 |
| siRNA 1816 | 1816 | 7306 |
| siRNA 1821 | 1821 | 7311 |
| siRNA 1825 | 1825 | 7315 |
| siRNA 1826 | 1826 | 7316 |
| siRNA 1832 | 1832 | 7322 |
| siRNA 1834 | 1834 | 7324 |
| siRNA 1844 | 1844 | 7334 |
| siRNA 1846 | 1846 | 7336 |
| siRNA 1847 | 1847 | 7337 |
| siRNA 1851 | 1851 | 7341 |
| siRNA 1857 | 1857 | 7347 |
| siRNA 1861 | 1861 | 7351 |
| siRNA 1865 | 1865 | 7355 |
| siRNA 1897 | 1897 | 7387 |
| siRNA 1909 | 1909 | 7399 |
| siRNA 1912 | 1912 | 7402 |
| siRNA 1914 | 1914 | 7404 |
| siRNA 1915 | 1915 | 7405 |
| siRNA 1916 | 1916 | 7406 |
| siRNA 1917 | 1917 | 7407 |
| siRNA 1918 | 1918 | 7408 |
| siRNA 1919 | 1919 | 7409 |
| siRNA 1920 | 1920 | 7410 |
| siRNA 1921 | 1921 | 7411 |
| siRNA 1922 | 1922 | 7412 |
| siRNA 1923 | 1923 | 7413 |
| siRNA 1924 | 1924 | 7414 |
| siRNA 1926 | 1926 | 7416 |
| siRNA 1927 | 1927 | 7417 |
| siRNA 1928 | 1928 | 7418 |
| siRNA 1929 | 1929 | 7419 |
| siRNA 1934 | 1934 | 7424 |
| siRNA 1935 | 1935 | 7425 |
| siRNA 1936 | 1936 | 7426 |
| siRNA 1937 | 1937 | 7427 |
| siRNA 1938 | 1938 | 7428 |
| siRNA 1940 | 1940 | 7430 |
| siRNA 1941 | 1941 | 7431 |
| siRNA 1948 | 1948 | 7438 |
| siRNA 1951 | 1951 | 7441 |
| siRNA 1977 | 1977 | 7467 |
| siRNA 1980 | 1980 | 7470 |
| siRNA 1981 | 1981 | 7471 |
| siRNA 1984 | 1984 | 7474 |
| siRNA 1985 | 1985 | 7475 |
| siRNA 1986 | 1986 | 7476 |
| siRNA 1987 | 1987 | 7477 |
| siRNA 1988 | 1988 | 7478 |
| siRNA 1989 | 1989 | 7479 |
| siRNA 1991 | 1991 | 7481 |
| siRNA 1992 | 1992 | 7482 |
| siRNA 1994 | 1994 | 7484 |
| siRNA 1995 | 1995 | 7485 |
| siRNA 1996 | 1996 | 7486 |
| siRNA 1999 | 1999 | 7489 |
| siRNA 2000 | 2000 | 7490 |
| siRNA 2002 | 2002 | 7492 |
| siRNA 2005 | 2005 | 7495 |
| siRNA 2006 | 2006 | 7496 |
| siRNA 2007 | 2007 | 7497 |
| siRNA 2014 | 2014 | 7504 |
| siRNA 2020 | 2020 | 7510 |
| siRNA 2049 | 2049 | 7539 |
| siRNA 2051 | 2051 | 7541 |
| siRNA 2056 | 2056 | 7546 |
| siRNA 2057 | 2057 | 7547 |
| siRNA 2062 | 2062 | 7552 |
| siRNA 2065 | 2065 | 7555 |
| siRNA 2071 | 2071 | 7561 |
| siRNA 2073 | 2073 | 7563 |
| siRNA 2074 | 2074 | 7564 |
| siRNA 2077 | 2077 | 7567 |
| siRNA 2088 | 2088 | 7578 |
| siRNA 2096 | 2096 | 7586 |
| siRNA 2109 | 2109 | 7599 |
| siRNA 2112 | 2112 | 7602 |
| siRNA 2116 | 2116 | 7606 |
| siRNA 2120 | 2120 | 7610 |
| siRNA 2142 | 2142 | 7632 |
| siRNA 2147 | 2147 | 7637 |
| siRNA 2148 | 2148 | 7638 |
| siRNA 2149 | 2149 | 7639 |
| siRNA 2150 | 2150 | 7640 |
| siRNA 2151 | 2151 | 7641 |
| siRNA 2152 | 2152 | 7642 |
| siRNA 2154 | 2154 | 7644 |
| siRNA 2157 | 2157 | 7647 |
| siRNA 2158 | 2158 | 7648 |
| siRNA 2161 | 2161 | 7651 |
| siRNA 2164 | 2164 | 7654 |
| siRNA 2167 | 2167 | 7657 |
| siRNA 2168 | 2168 | 7658 |
| siRNA 2170 | 2170 | 7660 |
| siRNA 2171 | 2171 | 7661 |
| siRNA 2172 | 2172 | 7662 |
| siRNA 2175 | 2175 | 7665 |
| siRNA 2193 | 2193 | 7683 |
| siRNA 2202 | 2202 | 7692 |
| siRNA 2209 | 2209 | 7699 |
| siRNA 2213 | 2213 | 7703 |
| siRNA 2214 | 2214 | 7704 |
| siRNA 2216 | 2216 | 7706 |
| siRNA 2219 | 2219 | 7709 |
| siRNA 2220 | 2220 | 7710 |
| siRNA 2244 | 2244 | 7734 |
| siRNA 2245 | 2245 | 7735 |
| siRNA 2246 | 2246 | 7736 |
| siRNA 2250 | 2250 | 7740 |
| siRNA 2251 | 2251 | 7741 |
| siRNA 2252 | 2252 | 7742 |
| siRNA 2254 | 2254 | 7744 |
| siRNA 2257 | 2257 | 7747 |
| siRNA 2258 | 2258 | 7748 |
| siRNA 2259 | 2259 | 7749 |
| siRNA 2286 | 2286 | 7776 |
| siRNA 2287 | 2287 | 7777 |
| siRNA 2292 | 2292 | 7782 |
| siRNA 2294 | 2294 | 7784 |
| siRNA 2306 | 2306 | 7796 |
| siRNA 2307 | 2307 | 7797 |
| siRNA 2310 | 2310 | 7800 |
| siRNA 2311 | 2311 | 7801 |
| siRNA 2312 | 2312 | 7802 |
| siRNA 2313 | 2313 | 7803 |
| siRNA 2314 | 2314 | 7804 |
| siRNA 2318 | 2318 | 7808 |
| siRNA 2322 | 2322 | 7812 |
| siRNA 2324 | 2324 | 7814 |
| siRNA 2328 | 2328 | 7818 |
| siRNA 2329 | 2329 | 7819 |
| siRNA 2332 | 2332 | 7822 |
| siRNA 2336 | 2336 | 7826 |
| siRNA 2338 | 2338 | 7828 |
| siRNA 2339 | 2339 | 7829 |
| siRNA 2340 | 2340 | 7830 |
| siRNA 2355 | 2355 | 7845 |
| siRNA 2356 | 2356 | 7846 |
| siRNA 2357 | 2357 | 7847 |
| siRNA 2360 | 2360 | 7850 |
| siRNA 2362 | 2362 | 7852 |
| siRNA 2364 | 2364 | 7854 |
| siRNA 2365 | 2365 | 7855 |
| siRNA 2366 | 2366 | 7856 |
| siRNA 2368 | 2368 | 7858 |
| siRNA 2369 | 2369 | 7859 |
| siRNA 2370 | 2370 | 7860 |
| siRNA 2393 | 2393 | 7883 |
| siRNA 2403 | 2403 | 7893 |
| siRNA 2417 | 2417 | 7907 |
| siRNA 2418 | 2418 | 7908 |
| siRNA 2436 | 2436 | 7926 |
| siRNA 2437 | 2437 | 7927 |
| siRNA 2467 | 2467 | 7957 |
| siRNA 2470 | 2470 | 7960 |
| siRNA 2471 | 2471 | 7961 |
| siRNA 2472 | 2472 | 7962 |
| siRNA 2477 | 2477 | 7967 |
| siRNA 2480 | 2480 | 7970 |
| siRNA 2483 | 2483 | 7973 |
| siRNA 2486 | 2486 | 7976 |
| siRNA 2488 | 2488 | 7978 |
| siRNA 2489 | 2489 | 7979 |
| siRNA 2490 | 2490 | 7980 |
| siRNA 2528 | 2528 | 8018 |
| siRNA 2530 | 2530 | 8020 |
| siRNA 2531 | 2531 | 8021 |
| siRNA 2532 | 2532 | 8022 |
| siRNA 2548 | 2548 | 8038 |
| siRNA 2559 | 2559 | 8049 |
| siRNA 2565 | 2565 | 8055 |
| siRNA 2568 | 2568 | 8058 |
| siRNA 2575 | 2575 | 8065 |
| siRNA 2577 | 2577 | 8067 |
| siRNA 2598 | 2598 | 8088 |
| siRNA 2610 | 2610 | 8100 |
| siRNA 2611 | 2611 | 8101 |
| siRNA 2616 | 2616 | 8106 |
| siRNA 2619 | 2619 | 8109 |
| siRNA 2620 | 2620 | 8110 |
| siRNA 2623 | 2623 | 8113 |
| siRNA 2630 | 2630 | 8120 |
| siRNA 2631 | 2631 | 8121 |
| siRNA 2632 | 2632 | 8122 |
| siRNA 2633 | 2633 | 8123 |
| siRNA 2637 | 2637 | 8127 |
| siRNA 2640 | 2640 | 8130 |
| siRNA 2642 | 2642 | 8132 |
| siRNA 2644 | 2644 | 8134 |
| siRNA 2645 | 2645 | 8135 |
| siRNA 2646 | 2646 | 8136 |
| siRNA 2673 | 2673 | 8163 |
| siRNA 2675 | 2675 | 8165 |
| siRNA 2679 | 2679 | 8169 |
| siRNA 2680 | 2680 | 8170 |
| siRNA 2682 | 2682 | 8172 |
| siRNA 2683 | 2683 | 8173 |
| siRNA 2688 | 2688 | 8178 |
| siRNA 2690 | 2690 | 8180 |
| siRNA 2691 | 2691 | 8181 |
| siRNA 2699 | 2699 | 8189 |
| siRNA 2708 | 2708 | 8198 |
| siRNA 2713 | 2713 | 8203 |
| siRNA 2755 | 2755 | 8245 |
| siRNA 2756 | 2756 | 8246 |
| siRNA 2757 | 2757 | 8247 |
| siRNA 2759 | 2759 | 8249 |
| siRNA 2760 | 2760 | 8250 |
| siRNA 2761 | 2761 | 8251 |
| siRNA 2762 | 2762 | 8252 |
| siRNA 2763 | 2763 | 8253 |
| siRNA 2764 | 2764 | 8254 |
| siRNA 2767 | 2767 | 8257 |
| siRNA 2815 | 2815 | 8305 |
| siRNA 2816 | 2816 | 8306 |
| siRNA 2817 | 2817 | 8307 |
| siRNA 2821 | 2821 | 8311 |
| siRNA 2822 | 2822 | 8312 |
| siRNA 2825 | 2825 | 8315 |
| siRNA 2828 | 2828 | 8318 |
| siRNA 2829 | 2829 | 8319 |
| siRNA 2830 | 2830 | 8320 |
| siRNA 2833 | 2833 | 8323 |
| siRNA 2834 | 2834 | 8324 |
| siRNA 2836 | 2836 | 8326 |
| siRNA 2841 | 2841 | 8331 |
| siRNA 2842 | 2842 | 8332 |
| siRNA 2847 | 2847 | 8337 |
| siRNA 2866 | 2866 | 8356 |
| siRNA 2882 | 2882 | 8372 |
| siRNA 2883 | 2883 | 8373 |
| siRNA 2884 | 2884 | 8374 |
| siRNA 2886 | 2886 | 8376 |
| siRNA 2887 | 2887 | 8377 |
| siRNA 2888 | 2888 | 8378 |
| siRNA 2890 | 2890 | 8380 |
| siRNA 2897 | 2897 | 8387 |
| siRNA 2898 | 2898 | 8388 |
| siRNA 2902 | 2902 | 8392 |
| siRNA 2903 | 2903 | 8393 |
| siRNA 2908 | 2908 | 8398 |
| siRNA 2917 | 2917 | 8407 |
| siRNA 2926 | 2926 | 8416 |
| siRNA 2928 | 2928 | 8418 |
| siRNA 2929 | 2929 | 8419 |
| siRNA 2930 | 2930 | 8420 |
| siRNA 2932 | 2932 | 8422 |
| siRNA 2933 | 2933 | 8423 |
| siRNA 2937 | 2937 | 8427 |
| siRNA 2938 | 2938 | 8428 |
| siRNA 2939 | 2939 | 8429 |
| siRNA 2940 | 2940 | 8430 |
| siRNA 2942 | 2942 | 8432 |
| siRNA 2944 | 2944 | 8434 |
| siRNA 2946 | 2946 | 8436 |
| siRNA 2947 | 2947 | 8437 |
| siRNA 2949 | 2949 | 8439 |
| siRNA 2952 | 2952 | 8442 |
| siRNA 2981 | 2981 | 8471 |
| siRNA 2982 | 2982 | 8472 |
| siRNA 2983 | 2983 | 8473 |
| siRNA 2984 | 2984 | 8474 |
| siRNA 2985 | 2985 | 8475 |
| siRNA 2986 | 2986 | 8476 |
| siRNA 2987 | 2987 | 8477 |
| siRNA 2998 | 2998 | 8488 |
| siRNA 3006 | 3006 | 8496 |
| siRNA 3024 | 3024 | 8514 |
| siRNA 3025 | 3025 | 8515 |
| siRNA 3035 | 3035 | 8525 |
| siRNA 3038 | 3038 | 8528 |
| siRNA 3042 | 3042 | 8532 |
| siRNA 3046 | 3046 | 8536 |
| siRNA 3053 | 3053 | 8543 |
| siRNA 3091 | 3091 | 8581 |
| siRNA 3093 | 3093 | 8583 |
| siRNA 3094 | 3094 | 8584 |
| siRNA 3098 | 3098 | 8588 |
| siRNA 3099 | 3099 | 8589 |
| siRNA 3108 | 3108 | 8598 |
| siRNA 3140 | 3140 | 8630 |
| siRNA 3146 | 3146 | 8636 |
| siRNA 3156 | 3156 | 8646 |
| siRNA 3164 | 3164 | 8654 |
| siRNA 3200 | 3200 | 8690 |
| siRNA 3209 | 3209 | 8699 |
| siRNA 3218 | 3218 | 8708 |
| siRNA 3221 | 3221 | 8711 |
| siRNA 3222 | 3222 | 8712 |
| siRNA 3223 | 3223 | 8713 |
| siRNA 3224 | 3224 | 8714 |
| siRNA 3230 | 3230 | 8720 |
| siRNA 3231 | 3231 | 8721 |
| siRNA 3232 | 3232 | 8722 |
| siRNA 3238 | 3238 | 8728 |
| siRNA 3247 | 3247 | 8737 |
| siRNA 3259 | 3259 | 8749 |
| siRNA 3261 | 3261 | 8751 |
| siRNA 3262 | 3262 | 8752 |
| siRNA 3263 | 3263 | 8753 |
| siRNA 3276 | 3276 | 8766 |
| siRNA 3277 | 3277 | 8767 |
| siRNA 3305 | 3305 | 8795 |
| siRNA 3310 | 3310 | 8800 |
| siRNA 3315 | 3315 | 8805 |
| siRNA 3330 | 3330 | 8820 |
| siRNA 3333 | 3333 | 8823 |
| siRNA 3334 | 3334 | 8824 |
| siRNA 3335 | 3335 | 8825 |
| siRNA 3339 | 3339 | 8829 |
| siRNA 3342 | 3342 | 8832 |
| siRNA 3349 | 3349 | 8839 |
| siRNA 3350 | 3350 | 8840 |
| siRNA 3351 | 3351 | 8841 |
| siRNA 3352 | 3352 | 8842 |
| siRNA 3353 | 3353 | 8843 |
| siRNA 3354 | 3354 | 8844 |
| siRNA 3355 | 3355 | 8845 |
| siRNA 3357 | 3357 | 8847 |
| siRNA 3358 | 3358 | 8848 |
| siRNA 3359 | 3359 | 8849 |
| siRNA 3360 | 3360 | 8850 |
| siRNA 3364 | 3364 | 8854 |
| siRNA 3396 | 3396 | 8886 |
| siRNA 3397 | 3397 | 8887 |
| siRNA 3403 | 3403 | 8893 |
| siRNA 3405 | 3405 | 8895 |
| siRNA 3406 | 3406 | 8896 |
| siRNA 3407 | 3407 | 8897 |
| siRNA 3410 | 3410 | 8900 |
| siRNA 3411 | 3411 | 8901 |
| siRNA 3412 | 3412 | 8902 |
| siRNA 3413 | 3413 | 8903 |
| siRNA 3415 | 3415 | 8905 |
| siRNA 3416 | 3416 | 8906 |
| siRNA 3417 | 3417 | 8907 |
| siRNA 3418 | 3418 | 8908 |
| siRNA 3425 | 3425 | 8915 |
| siRNA 3431 | 3431 | 8921 |
| siRNA 3432 | 3432 | 8922 |
| siRNA 3435 | 3435 | 8925 |
| siRNA 3436 | 3436 | 8926 |
| siRNA 3437 | 3437 | 8927 |
| siRNA 3438 | 3438 | 8928 |
| siRNA 3439 | 3439 | 8929 |
| siRNA 3443 | 3443 | 8933 |
| siRNA 3444 | 3444 | 8934 |
| siRNA 3449 | 3449 | 8939 |
| siRNA 3450 | 3450 | 8940 |
| siRNA 3451 | 3451 | 8941 |
| siRNA 3456 | 3456 | 8946 |
| siRNA 3457 | 3457 | 8947 |
| siRNA 3458 | 3458 | 8948 |
| siRNA 3460 | 3460 | 8950 |
| siRNA 3461 | 3461 | 8951 |
| siRNA 3470 | 3470 | 8960 |
| siRNA 3471 | 3471 | 8961 |
| siRNA 3472 | 3472 | 8962 |
| siRNA 3484 | 3484 | 8974 |
| siRNA 3487 | 3487 | 8977 |
| siRNA 3488 | 3488 | 8978 |
| siRNA 3489 | 3489 | 8979 |
| siRNA 3490 | 3490 | 8980 |
| siRNA 3491 | 3491 | 8981 |
| siRNA 3492 | 3492 | 8982 |
| siRNA 3494 | 3494 | 8984 |
| siRNA 3495 | 3495 | 8985 |
| siRNA 3500 | 3500 | 8990 |
| siRNA 3502 | 3502 | 8992 |
| siRNA 3504 | 3504 | 8994 |
| siRNA 3511 | 3511 | 9001 |
| siRNA 3512 | 3512 | 9002 |
| siRNA 3516 | 3516 | 9006 |
| siRNA 3517 | 3517 | 9007 |
| siRNA 3540 | 3540 | 9030 |
| siRNA 3546 | 3546 | 9036 |
| siRNA 3549 | 3549 | 9039 |
| siRNA 3558 | 3558 | 9048 |
| siRNA 3560 | 3560 | 9050 |
| siRNA 3561 | 3561 | 9051 |
| siRNA 3564 | 3564 | 9054 |
| siRNA 3566 | 3566 | 9056 |
| siRNA 3576 | 3576 | 9066 |
| siRNA 3582 | 3582 | 9072 |
| siRNA 3583 | 3583 | 9073 |
| siRNA 3585 | 3585 | 9075 |
| siRNA 3586 | 3586 | 9076 |
| siRNA 3587 | 3587 | 9077 |
| siRNA 3602 | 3602 | 9092 |
| siRNA 3604 | 3604 | 9094 |
| siRNA 3605 | 3605 | 9095 |
| siRNA 3610 | 3610 | 9100 |
| siRNA 3619 | 3619 | 9109 |
| siRNA 3629 | 3629 | 9119 |
| siRNA 3634 | 3634 | 9124 |
| siRNA 3635 | 3635 | 9125 |
| siRNA 3637 | 3637 | 9127 |
| siRNA 3638 | 3638 | 9128 |
| siRNA 3639 | 3639 | 9129 |
| siRNA 3640 | 3640 | 9130 |
| siRNA 3641 | 3641 | 9131 |
| siRNA 3663 | 3663 | 9153 |
| siRNA 3677 | 3677 | 9167 |
| siRNA 3685 | 3685 | 9175 |
| siRNA 3686 | 3686 | 9176 |
| siRNA 3688 | 3688 | 9178 |
| siRNA 3691 | 3691 | 9181 |
| siRNA 3692 | 3692 | 9182 |
| siRNA 3695 | 3695 | 9185 |
| siRNA 3703 | 3703 | 9193 |
| siRNA 3709 | 3709 | 9199 |
| siRNA 3712 | 3712 | 9202 |
| siRNA 3746 | 3746 | 9236 |
| siRNA 3747 | 3747 | 9237 |
| siRNA 3748 | 3748 | 9238 |
| siRNA 3756 | 3756 | 9246 |
| siRNA 3792 | 3792 | 9282 |
| siRNA 3802 | 3802 | 9292 |
| siRNA 3803 | 3803 | 9293 |
| siRNA 3807 | 3807 | 9297 |
| siRNA 3810 | 3810 | 9300 |
| siRNA 3816 | 3816 | 9306 |
| siRNA 3838 | 3838 | 9328 |
| siRNA 3840 | 3840 | 9330 |
| siRNA 3841 | 3841 | 9331 |
| siRNA 3868 | 3868 | 9358 |
| siRNA 3869 | 3869 | 9359 |
| siRNA 3874 | 3874 | 9364 |
| siRNA 3875 | 3875 | 9365 |
| siRNA 3883 | 3883 | 9373 |
| siRNA 3897 | 3897 | 9387 |
| siRNA 3908 | 3908 | 9398 |
| siRNA 3909 | 3909 | 9399 |
| siRNA 3911 | 3911 | 9401 |
| siRNA 3912 | 3912 | 9402 |
| siRNA 3922 | 3922 | 9412 |
| siRNA 3926 | 3926 | 9416 |
| siRNA 3934 | 3934 | 9424 |
| siRNA 3936 | 3936 | 9426 |
| siRNA 3943 | 3943 | 9433 |
| siRNA 3944 | 3944 | 9434 |
| siRNA 3945 | 3945 | 9435 |
| siRNA 3960 | 3960 | 9450 |
| siRNA 3969 | 3969 | 9459 |
| siRNA 3970 | 3970 | 9460 |
| siRNA 3988 | 3988 | 9478 |
| siRNA 3991 | 3991 | 9481 |
| siRNA 4010 | 4010 | 9500 |
| siRNA 4025 | 4025 | 9515 |
| siRNA 4027 | 4027 | 9517 |
| siRNA 4036 | 4036 | 9526 |
| siRNA 4038 | 4038 | 9528 |
| siRNA 4040 | 4040 | 9530 |
| siRNA 4041 | 4041 | 9531 |
| siRNA 4043 | 4043 | 9533 |
| siRNA 4044 | 4044 | 9534 |
| siRNA 4047 | 4047 | 9537 |
| siRNA 4048 | 4048 | 9538 |
| siRNA 4049 | 4049 | 9539 |
| siRNA 4050 | 4050 | 9540 |
| siRNA 4051 | 4051 | 9541 |
| siRNA 4052 | 4052 | 9542 |
| siRNA 4053 | 4053 | 9543 |
| siRNA 4054 | 4054 | 9544 |
| siRNA 4056 | 4056 | 9546 |
| siRNA 4058 | 4058 | 9548 |
| siRNA 4064 | 4064 | 9554 |
| siRNA 4068 | 4068 | 9558 |
| siRNA 4070 | 4070 | 9560 |
| siRNA 4077 | 4077 | 9567 |
| siRNA 4083 | 4083 | 9573 |
| siRNA 4111 | 4111 | 9601 |
| siRNA 4112 | 4112 | 9602 |
| siRNA 4117 | 4117 | 9607 |
| siRNA 4122 | 4122 | 9612 |
| siRNA 4125 | 4125 | 9615 |
| siRNA 4132 | 4132 | 9622 |
| siRNA 4133 | 4133 | 9623 |
| siRNA 4138 | 4138 | 9628 |
| siRNA 4169 | 4169 | 9659 |
| siRNA 4179 | 4179 | 9669 |
| siRNA 4190 | 4190 | 9680 |
| siRNA 4192 | 4192 | 9682 |
| siRNA 4199 | 4199 | 9689 |
| siRNA 4207 | 4207 | 9697 |
| siRNA 4209 | 4209 | 9699 |
| siRNA 4210 | 4210 | 9700 |
| siRNA 4211 | 4211 | 9701 |
| siRNA 4212 | 4212 | 9702 |
| siRNA 4213 | 4213 | 9703 |
| siRNA 4214 | 4214 | 9704 |
| siRNA 4216 | 4216 | 9706 |
| siRNA 4218 | 4218 | 9708 |
| siRNA 4219 | 4219 | 9709 |
| siRNA 4222 | 4222 | 9712 |
| siRNA 4223 | 4223 | 9713 |
| siRNA 4224 | 4224 | 9714 |
| siRNA 4225 | 4225 | 9715 |
| siRNA 4226 | 4226 | 9716 |
| siRNA 4228 | 4228 | 9718 |
| siRNA 4233 | 4233 | 9723 |
| siRNA 4235 | 4235 | 9725 |
| siRNA 4237 | 4237 | 9727 |
| siRNA 4238 | 4238 | 9728 |
| siRNA 4242 | 4242 | 9732 |
| siRNA 4243 | 4243 | 9733 |
| siRNA 4245 | 4245 | 9735 |
| siRNA 4247 | 4247 | 9737 |
| siRNA 4252 | 4252 | 9742 |
| siRNA 4254 | 4254 | 9744 |
| siRNA 4275 | 4275 | 9765 |
| siRNA 4276 | 4276 | 9766 |
| siRNA 4277 | 4277 | 9767 |
| siRNA 4279 | 4279 | 9769 |
| siRNA 4282 | 4282 | 9772 |
| siRNA 4283 | 4283 | 9773 |
| siRNA 4284 | 4284 | 9774 |
| siRNA 4290 | 4290 | 9780 |
| siRNA 4292 | 4292 | 9782 |
| siRNA 4293 | 4293 | 9783 |
| siRNA 4294 | 4294 | 9784 |
| siRNA 4295 | 4295 | 9785 |
| siRNA 4296 | 4296 | 9786 |
| siRNA 4297 | 4297 | 9787 |
| siRNA 4305 | 4305 | 9795 |
| siRNA 4309 | 4309 | 9799 |
| siRNA 4313 | 4313 | 9803 |
| siRNA 4319 | 4319 | 9809 |
| siRNA 4322 | 4322 | 9812 |
| siRNA 4326 | 4326 | 9816 |
| siRNA 4351 | 4351 | 9841 |
| siRNA 4356 | 4356 | 9846 |
| siRNA 4368 | 4368 | 9858 |
| siRNA 4382 | 4382 | 9872 |
| siRNA 4388 | 4388 | 9878 |
| siRNA 4409 | 4409 | 9899 |
| siRNA 4414 | 4414 | 9904 |
| siRNA 4453 | 4453 | 9943 |
| siRNA 4455 | 4455 | 9945 |
| siRNA 4456 | 4456 | 9946 |
| siRNA 4459 | 4459 | 9949 |
| siRNA 4460 | 4460 | 9950 |
| siRNA 4467 | 4467 | 9957 |
| siRNA 4468 | 4468 | 9958 |
| siRNA 4474 | 4474 | 9964 |
| siRNA 4475 | 4475 | 9965 |
| siRNA 4481 | 4481 | 9971 |
| siRNA 4482 | 4482 | 9972 |
| siRNA 4487 | 4487 | 9977 |
| siRNA 4488 | 4488 | 9978 |
| siRNA 4489 | 4489 | 9979 |
| siRNA 4490 | 4490 | 9980 |
| siRNA 4491 | 4491 | 9981 |
| siRNA 4492 | 4492 | 9982 |
| siRNA 4496 | 4496 | 9986 |
| siRNA 4518 | 4518 | 10008 |
| siRNA 4519 | 4519 | 10009 |
| siRNA 4521 | 4521 | 10011 |
| siRNA 4527 | 4527 | 10017 |
| siRNA 4545 | 4545 | 10035 |
| siRNA 4547 | 4547 | 10037 |
| siRNA 4551 | 4551 | 10041 |
| siRNA 4552 | 4552 | 10042 |
| siRNA 4561 | 4561 | 10051 |
| siRNA 4565 | 4565 | 10055 |
| siRNA 4576 | 4576 | 10066 |
| siRNA 4584 | 4584 | 10074 |
| siRNA 4593 | 4593 | 10083 |
| siRNA 4594 | 4594 | 10084 |
| siRNA 4595 | 4595 | 10085 |
| siRNA 4596 | 4596 | 10086 |
| siRNA 4597 | 4597 | 10087 |
| siRNA 4598 | 4598 | 10088 |
| siRNA 4599 | 4599 | 10089 |
| siRNA 4600 | 4600 | 10090 |
| siRNA 4601 | 4601 | 10091 |
| siRNA 4628 | 4628 | 10118 |
| siRNA 4629 | 4629 | 10119 |
| siRNA 4644 | 4644 | 10134 |
| siRNA 4674 | 4674 | 10164 |
| siRNA 4675 | 4675 | 10165 |
| siRNA 4679 | 4679 | 10169 |
| siRNA 4680 | 4680 | 10170 |
| siRNA 4682 | 4682 | 10172 |
| siRNA 4705 | 4705 | 10195 |
| siRNA 4726 | 4726 | 10216 |
| siRNA 4739 | 4739 | 10229 |
| siRNA 4742 | 4742 | 10232 |
| siRNA 4749 | 4749 | 10239 |
| siRNA 4754 | 4754 | 10244 |
| siRNA 4756 | 4756 | 10246 |
| siRNA 4758 | 4758 | 10248 |
| siRNA 4763 | 4763 | 10253 |
| siRNA 4765 | 4765 | 10255 |
| siRNA 4767 | 4767 | 10257 |
| siRNA 4770 | 4770 | 10260 |
| siRNA 4788 | 4788 | 10278 |
| siRNA 4797 | 4797 | 10287 |
| siRNA 4799 | 4799 | 10289 |
| siRNA 4800 | 4800 | 10290 |
| siRNA 4802 | 4802 | 10292 |
| siRNA 4805 | 4805 | 10295 |
| siRNA 4807 | 4807 | 10297 |
| siRNA 4852 | 4852 | 10342 |
| siRNA 4862 | 4862 | 10352 |
| siRNA 4863 | 4863 | 10353 |
| siRNA 4902 | 4902 | 10392 |
| siRNA 4903 | 4903 | 10393 |
| siRNA 4905 | 4905 | 10395 |
| siRNA 4906 | 4906 | 10396 |
| siRNA 4910 | 4910 | 10400 |
| siRNA 4911 | 4911 | 10401 |
| siRNA 4915 | 4915 | 10405 |
| siRNA 4932 | 4932 | 10422 |
| siRNA 4934 | 4934 | 10424 |
| siRNA 4935 | 4935 | 10425 |
| siRNA 4936 | 4936 | 10426 |
| siRNA 4943 | 4943 | 10433 |
| siRNA 4945 | 4945 | 10435 |
| siRNA 4947 | 4947 | 10437 |
| siRNA 4975 | 4975 | 10465 |
| siRNA 4976 | 4976 | 10466 |
| siRNA 4977 | 4977 | 10467 |
| siRNA 4981 | 4981 | 10471 |
| siRNA 4982 | 4982 | 10472 |
| siRNA 4983 | 4983 | 10473 |
| siRNA 4984 | 4984 | 10474 |
| siRNA 4989 | 4989 | 10479 |
| siRNA 4990 | 4990 | 10480 |
| siRNA 4991 | 4991 | 10481 |
| siRNA 4992 | 4992 | 10482 |
| siRNA 4993 | 4993 | 10483 |
| siRNA 4994 | 4994 | 10484 |
| siRNA 4996 | 4996 | 10486 |
| siRNA 4997 | 4997 | 10487 |
| siRNA 4999 | 4999 | 10489 |
| siRNA 5000 | 5000 | 10490 |
| siRNA 5001 | 5001 | 10491 |
| siRNA 5002 | 5002 | 10492 |
| siRNA 5004 | 5004 | 10494 |
| siRNA 5014 | 5014 | 10504 |
| siRNA 5017 | 5017 | 10507 |
| siRNA 5020 | 5020 | 10510 |
| siRNA 5027 | 5027 | 10517 |
| siRNA 5063 | 5063 | 10553 |
| siRNA 5071 | 5071 | 10561 |
| siRNA 5072 | 5072 | 10562 |
| siRNA 5073 | 5073 | 10563 |
| siRNA 5092 | 5092 | 10582 |
| siRNA 5097 | 5097 | 10587 |
| siRNA 5100 | 5100 | 10590 |
| siRNA 5103 | 5103 | 10593 |
| siRNA 5106 | 5106 | 10596 |
| siRNA 5109 | 5109 | 10599 |
| siRNA 5118 | 5118 | 10608 |
| siRNA 5119 | 5119 | 10609 |
| siRNA 5120 | 5120 | 10610 |
| siRNA 5124 | 5124 | 10614 |
| siRNA 5126 | 5126 | 10616 |
| siRNA 5152 | 5152 | 10642 |
| siRNA 5153 | 5153 | 10643 |
| siRNA 5157 | 5157 | 10647 |
| siRNA 5158 | 5158 | 10648 |
| siRNA 5162 | 5162 | 10652 |
| siRNA 5164 | 5164 | 10654 |
| siRNA 5166 | 5166 | 10656 |
| siRNA 5177 | 5177 | 10667 |
| siRNA 5182 | 5182 | 10672 |
| siRNA 5184 | 5184 | 10674 |
| siRNA 5186 | 5186 | 10676 |
| siRNA 5189 | 5189 | 10679 |
| siRNA 5190 | 5190 | 10680 |
| siRNA 5191 | 5191 | 10681 |
| siRNA 5193 | 5193 | 10683 |
| siRNA 5194 | 5194 | 10684 |
| siRNA 5206 | 5206 | 10696 |
| siRNA 5207 | 5207 | 10697 |
| siRNA 5208 | 5208 | 10698 |
| siRNA 5210 | 5210 | 10700 |
| siRNA 5211 | 5211 | 10701 |
| siRNA 5214 | 5214 | 10704 |
| siRNA 5216 | 5216 | 10706 |
| siRNA 5217 | 5217 | 10707 |
| siRNA 5218 | 5218 | 10708 |
| siRNA 5274 | 5274 | 10764 |
| siRNA 5280 | 5280 | 10770 |
| siRNA 5291 | 5291 | 10781 |
| siRNA 5297 | 5297 | 10787 |
| siRNA 5305 | 5305 | 10795 |
| siRNA 5306 | 5306 | 10796 |
| siRNA 5310 | 5310 | 10800 |
| siRNA 5313 | 5313 | 10803 |
| siRNA 5334 | 5334 | 10824 |
| siRNA 5335 | 5335 | 10825 |
| siRNA 5337 | 5337 | 10827 |
| siRNA 5338 | 5338 | 10828 |
| siRNA 5339 | 5339 | 10829 |
| siRNA 5340 | 5340 | 10830 |
| siRNA 5341 | 5341 | 10831 |
| siRNA 5343 | 5343 | 10833 |
| siRNA 5344 | 5344 | 10834 |
| siRNA 5346 | 5346 | 10836 |
| siRNA 5349 | 5349 | 10839 |
| siRNA 5350 | 5350 | 10840 |
| siRNA 5352 | 5352 | 10842 |
| siRNA 5363 | 5363 | 10853 |
| siRNA 5369 | 5369 | 10859 |
| siRNA 5374 | 5374 | 10864 |
| siRNA 5375 | 5375 | 10865 |
| siRNA 5385 | 5385 | 10875 |
| siRNA 5392 | 5392 | 10882 |
| siRNA 5393 | 5393 | 10883 |
| siRNA 5396 | 5396 | 10886 |
| siRNA 5400 | 5400 | 10890 |
| siRNA 5404 | 5404 | 10894 |
| siRNA 5405 | 5405 | 10895 |
| siRNA 5408 | 5408 | 10898 |
| siRNA 5409 | 5409 | 10899 |
| siRNA 5410 | 5410 | 10900 |
| siRNA 5415 | 5415 | 10905 |
| siRNA 5423 | 5423 | 10913 |
| siRNA 5427 | 5427 | 10917 |
| siRNA 5431 | 5431 | 10921 |
| siRNA 5435 | 5435 | 10925 |
| siRNA 5443 | 5443 | 10933 |
| siRNA 5449 | 5449 | 10939 |
| siRNA 5450 | 5450 | 10940 |
| siRNA 5455 | 5455 | 10945 |
| siRNA 5476 | 5476 | 10966 |
| siRNA 5478 | 5478 | 10968 |
| siRNA 5482 | 5482 | 10972 |
| siRNA 5484 | 5484 | 10974 |
| siRNA 5485 | 5485 | 10975 |

[0435] The siRNAs in subset A had the following characteristics: Cross-reactivity: With 19mer in human SOS2 mRNA; Specificity category: For human: AS2 or better, SS3 or better; and miRNA seeds: AS+SS strand: seed region not conserved in human, mouse, and rat and not present in >4 species; Off-target frequency: ≤30 human off-targets matched with 2 mismatches in antisense strand; and SNPs: siRNA target sites do not harbor SNPs with a MAF≥100 (pos. 2-18).

[0436] The siRNA sequences in subset A were selected for more stringent specificity to yield subset B. Subset B includes 1123 siRNAs whose base sequences are shown in Table 16.

TABLE 16
Subset B

| | Sense | Antisense |
|---|---|---|
| siRNA Name | SEQ ID NO: | SEQ ID NO: |
| siRNA 47 | 47 | 5537 |
| siRNA 52 | 52 | 5542 |
| siRNA 53 | 53 | 5543 |
| siRNA 72 | 72 | 5562 |
| siRNA 105 | 105 | 5595 |
| siRNA 106 | 106 | 5596 |
| siRNA 108 | 108 | 5598 |
| siRNA 115 | 115 | 5605 |
| siRNA 129 | 129 | 5619 |
| siRNA 158 | 158 | 5648 |
| siRNA 159 | 159 | 5649 |
| siRNA 160 | 160 | 5650 |
| siRNA 164 | 164 | 5654 |
| siRNA 165 | 165 | 5655 |
| siRNA 200 | 200 | 5690 |
| siRNA 224 | 224 | 5714 |
| siRNA 233 | 233 | 5723 |
| siRNA 234 | 234 | 5724 |
| siRNA 236 | 236 | 5726 |
| siRNA 258 | 258 | 5748 |
| siRNA 266 | 266 | 5756 |
| siRNA 275 | 275 | 5765 |
| siRNA 281 | 281 | 5771 |
| siRNA 282 | 282 | 5772 |
| siRNA 301 | 301 | 5791 |
| siRNA 303 | 303 | 5793 |
| siRNA 305 | 305 | 5795 |
| siRNA 308 | 308 | 5798 |
| siRNA 310 | 310 | 5800 |
| siRNA 313 | 313 | 5803 |
| siRNA 315 | 315 | 5805 |
| siRNA 317 | 317 | 5807 |
| siRNA 323 | 323 | 5813 |
| siRNA 326 | 326 | 5816 |
| siRNA 331 | 331 | 5821 |
| siRNA 332 | 332 | 5822 |
| siRNA 336 | 336 | 5826 |
| siRNA 338 | 338 | 5828 |
| siRNA 341 | 341 | 5831 |
| siRNA 342 | 342 | 5832 |
| siRNA 347 | 347 | 5837 |
| siRNA 350 | 350 | 5840 |
| siRNA 351 | 351 | 5841 |
| siRNA 352 | 352 | 5842 |
| siRNA 353 | 353 | 5843 |
| siRNA 354 | 354 | 5844 |
| siRNA 356 | 356 | 5846 |
| siRNA 357 | 357 | 5847 |
| siRNA 364 | 364 | 5854 |
| siRNA 368 | 368 | 5858 |
| siRNA 370 | 370 | 5860 |
| siRNA 375 | 375 | 5865 |
| siRNA 376 | 376 | 5866 |
| siRNA 381 | 381 | 5871 |
| siRNA 394 | 394 | 5884 |
| siRNA 400 | 400 | 5890 |
| siRNA 403 | 403 | 5893 |
| siRNA 404 | 404 | 5894 |
| siRNA 405 | 405 | 5895 |
| siRNA 415 | 415 | 5905 |
| siRNA 416 | 416 | 5906 |
| siRNA 422 | 422 | 5912 |
| siRNA 424 | 424 | 5914 |
| siRNA 428 | 428 | 5918 |
| siRNA 436 | 436 | 5926 |
| siRNA 457 | 457 | 5947 |
| siRNA 462 | 462 | 5952 |
| siRNA 463 | 463 | 5953 |
| siRNA 464 | 464 | 5954 |
| siRNA 465 | 465 | 5955 |
| siRNA 468 | 468 | 5958 |
| siRNA 482 | 482 | 5972 |
| siRNA 488 | 488 | 5978 |
| siRNA 493 | 493 | 5983 |
| siRNA 494 | 494 | 5984 |
| siRNA 509 | 509 | 5999 |
| siRNA 510 | 510 | 6000 |
| siRNA 514 | 514 | 6004 |
| siRNA 523 | 523 | 6013 |
| siRNA 526 | 526 | 6016 |
| siRNA 528 | 528 | 6018 |
| siRNA 536 | 536 | 6026 |
| siRNA 538 | 538 | 6028 |
| siRNA 539 | 539 | 6029 |
| siRNA 541 | 541 | 6031 |
| siRNA 542 | 542 | 6032 |
| siRNA 546 | 546 | 6036 |
| siRNA 547 | 547 | 6037 |
| siRNA 552 | 552 | 6042 |
| siRNA 556 | 556 | 6046 |
| siRNA 558 | 558 | 6048 |
| siRNA 562 | 562 | 6052 |
| siRNA 570 | 570 | 6060 |
| siRNA 573 | 573 | 6063 |
| siRNA 574 | 574 | 6064 |
| siRNA 575 | 575 | 6065 |
| siRNA 585 | 585 | 6075 |
| siRNA 587 | 587 | 6077 |
| siRNA 589 | 589 | 6079 |
| siRNA 596 | 596 | 6086 |
| siRNA 602 | 602 | 6092 |
| siRNA 614 | 614 | 6104 |
| siRNA 617 | 617 | 6107 |
| siRNA 619 | 619 | 6109 |
| siRNA 620 | 620 | 6110 |
| siRNA 621 | 621 | 6111 |
| siRNA 622 | 622 | 6112 |
| siRNA 623 | 623 | 6113 |
| siRNA 625 | 625 | 6115 |
| siRNA 627 | 627 | 6117 |
| siRNA 632 | 632 | 6122 |
| siRNA 633 | 633 | 6123 |
| siRNA 637 | 637 | 6127 |
| siRNA 638 | 638 | 6128 |
| siRNA 639 | 639 | 6129 |
| siRNA 640 | 640 | 6130 |
| siRNA 643 | 643 | 6133 |
| siRNA 644 | 644 | 6134 |
| siRNA 647 | 647 | 6137 |
| siRNA 650 | 650 | 6140 |
| siRNA 651 | 651 | 6141 |
| siRNA 652 | 652 | 6142 |
| siRNA 653 | 653 | 6143 |
| siRNA 656 | 656 | 6146 |
| siRNA 657 | 657 | 6147 |
| siRNA 660 | 660 | 6150 |
| siRNA 662 | 662 | 6152 |
| siRNA 663 | 663 | 6153 |
| siRNA 664 | 664 | 6154 |
| siRNA 665 | 665 | 6155 |
| siRNA 666 | 666 | 6156 |
| siRNA 671 | 671 | 6161 |
| siRNA 674 | 674 | 6164 |
| siRNA 678 | 678 | 6168 |
| siRNA 679 | 679 | 6169 |
| siRNA 680 | 680 | 6170 |
| siRNA 682 | 682 | 6172 |
| siRNA 683 | 683 | 6173 |
| siRNA 685 | 685 | 6175 |
| siRNA 689 | 689 | 6179 |
| siRNA 690 | 690 | 6180 |
| siRNA 691 | 691 | 6181 |
| siRNA 692 | 692 | 6182 |
| siRNA 719 | 719 | 6209 |
| siRNA 736 | 736 | 6226 |
| siRNA 737 | 737 | 6227 |
| siRNA 738 | 738 | 6228 |
| siRNA 739 | 739 | 6229 |
| siRNA 740 | 740 | 6230 |
| siRNA 743 | 743 | 6233 |
| siRNA 744 | 744 | 6234 |
| siRNA 749 | 749 | 6239 |
| siRNA 750 | 750 | 6240 |
| siRNA 763 | 763 | 6253 |
| siRNA 764 | 764 | 6254 |
| siRNA 766 | 766 | 6256 |
| siRNA 771 | 771 | 6261 |
| siRNA 772 | 772 | 6262 |
| siRNA 782 | 782 | 6272 |
| siRNA 783 | 783 | 6273 |
| siRNA 784 | 784 | 6274 |
| siRNA 785 | 785 | 6275 |
| siRNA 786 | 786 | 6276 |
| siRNA 787 | 787 | 6277 |
| siRNA 788 | 788 | 6278 |
| siRNA 789 | 789 | 6279 |
| siRNA 792 | 792 | 6282 |
| siRNA 795 | 795 | 6285 |
| siRNA 796 | 796 | 6286 |
| siRNA 797 | 797 | 6287 |
| siRNA 810 | 810 | 6300 |
| siRNA 813 | 813 | 6303 |
| siRNA 818 | 818 | 6308 |
| siRNA 819 | 819 | 6309 |
| siRNA 831 | 831 | 6321 |
| siRNA 853 | 853 | 6343 |
| siRNA 854 | 854 | 6344 |
| siRNA 856 | 856 | 6346 |
| siRNA 857 | 857 | 6347 |
| siRNA 858 | 858 | 6348 |
| siRNA 859 | 859 | 6349 |
| siRNA 872 | 872 | 6362 |
| siRNA 876 | 876 | 6366 |
| siRNA 877 | 877 | 6367 |
| siRNA 884 | 884 | 6374 |
| siRNA 887 | 887 | 6377 |
| siRNA 888 | 888 | 6378 |
| siRNA 889 | 889 | 6379 |
| siRNA 890 | 890 | 6380 |
| siRNA 894 | 894 | 6384 |
| siRNA 922 | 922 | 6412 |
| siRNA 924 | 924 | 6414 |
| siRNA 925 | 925 | 6415 |
| siRNA 926 | 926 | 6416 |
| siRNA 928 | 928 | 6418 |
| siRNA 930 | 930 | 6420 |
| siRNA 933 | 933 | 6423 |
| siRNA 934 | 934 | 6424 |
| siRNA 935 | 935 | 6425 |
| siRNA 936 | 936 | 6426 |
| siRNA 938 | 938 | 6428 |
| siRNA 941 | 941 | 6431 |
| siRNA 942 | 942 | 6432 |
| siRNA 953 | 953 | 6443 |
| siRNA 954 | 954 | 6444 |
| siRNA 959 | 959 | 6449 |
| siRNA 961 | 961 | 6451 |
| siRNA 967 | 967 | 6457 |
| siRNA 973 | 973 | 6463 |
| siRNA 981 | 981 | 6471 |
| siRNA 999 | 999 | 6489 |
| siRNA 1000 | 1000 | 6490 |
| siRNA 1001 | 1001 | 6491 |
| siRNA 1004 | 1004 | 6494 |
| siRNA 1006 | 1006 | 6496 |
| siRNA 1007 | 1007 | 6497 |
| siRNA 1036 | 1036 | 6526 |
| siRNA 1040 | 1040 | 6530 |
| siRNA 1050 | 1050 | 6540 |
| siRNA 1052 | 1052 | 6542 |
| siRNA 1053 | 1053 | 6543 |
| siRNA 1054 | 1054 | 6544 |
| siRNA 1056 | 1056 | 6546 |
| siRNA 1062 | 1062 | 6552 |
| siRNA 1067 | 1067 | 6557 |
| siRNA 1072 | 1072 | 6562 |
| siRNA 1075 | 1075 | 6565 |
| siRNA 1082 | 1082 | 6572 |
| siRNA 1084 | 1084 | 6574 |
| siRNA 1085 | 1085 | 6575 |
| siRNA 1086 | 1086 | 6576 |
| siRNA 1087 | 1087 | 6577 |
| siRNA 1134 | 1134 | 6624 |
| siRNA 1153 | 1153 | 6643 |
| siRNA 1154 | 1154 | 6644 |
| siRNA 1155 | 1155 | 6645 |
| siRNA 1156 | 1156 | 6646 |
| siRNA 1157 | 1157 | 6647 |
| siRNA 1158 | 1158 | 6648 |
| siRNA 1159 | 1159 | 6649 |
| siRNA 1175 | 1175 | 6665 |
| siRNA 1178 | 1178 | 6668 |
| siRNA 1185 | 1185 | 6675 |
| siRNA 1187 | 1187 | 6677 |
| siRNA 1191 | 1191 | 6681 |
| siRNA 1192 | 1192 | 6682 |
| siRNA 1196 | 1196 | 6686 |
| siRNA 1224 | 1224 | 6714 |
| siRNA 1242 | 1242 | 6732 |
| siRNA 1248 | 1248 | 6738 |
| siRNA 1249 | 1249 | 6739 |
| siRNA 1250 | 1250 | 6740 |
| siRNA 1251 | 1251 | 6741 |
| siRNA 1255 | 1255 | 6745 |
| siRNA 1279 | 1279 | 6769 |
| siRNA 1280 | 1280 | 6770 |
| siRNA 1282 | 1282 | 6772 |
| siRNA 1286 | 1286 | 6776 |
| siRNA 1288 | 1288 | 6778 |
| siRNA 1294 | 1294 | 6784 |
| siRNA 1296 | 1296 | 6786 |
| siRNA 1301 | 1301 | 6791 |
| siRNA 1302 | 1302 | 6792 |
| siRNA 1303 | 1303 | 6793 |
| siRNA 1304 | 1304 | 6794 |
| siRNA 1307 | 1307 | 6797 |
| siRNA 1309 | 1309 | 6799 |
| siRNA 1318 | 1318 | 6808 |
| siRNA 1319 | 1319 | 6809 |
| siRNA 1320 | 1320 | 6810 |
| siRNA 1321 | 1321 | 6811 |
| siRNA 1322 | 1322 | 6812 |
| siRNA 1326 | 1326 | 6816 |
| siRNA 1333 | 1333 | 6823 |
| siRNA 1339 | 1339 | 6829 |
| siRNA 1340 | 1340 | 6830 |
| siRNA 1342 | 1342 | 6832 |
| siRNA 1343 | 1343 | 6833 |
| siRNA 1344 | 1344 | 6834 |
| siRNA 1346 | 1346 | 6836 |
| siRNA 1347 | 1347 | 6837 |
| siRNA 1351 | 1351 | 6841 |
| siRNA 1357 | 1357 | 6847 |
| siRNA 1363 | 1363 | 6853 |
| siRNA 1365 | 1365 | 6855 |
| siRNA 1372 | 1372 | 6862 |
| siRNA 1395 | 1395 | 6885 |
| siRNA 1398 | 1398 | 6888 |
| siRNA 1405 | 1405 | 6895 |
| siRNA 1406 | 1406 | 6896 |
| siRNA 1408 | 1408 | 6898 |
| siRNA 1410 | 1410 | 6900 |
| siRNA 1411 | 1411 | 6901 |
| siRNA 1422 | 1422 | 6912 |
| siRNA 1430 | 1430 | 6920 |
| siRNA 1431 | 1431 | 6921 |
| siRNA 1434 | 1434 | 6924 |
| siRNA 1435 | 1435 | 6925 |
| siRNA 1441 | 1441 | 6931 |
| siRNA 1442 | 1442 | 6932 |
| siRNA 1445 | 1445 | 6935 |
| siRNA 1448 | 1448 | 6938 |
| siRNA 1449 | 1449 | 6939 |
| siRNA 1452 | 1452 | 6942 |
| siRNA 1453 | 1453 | 6943 |
| siRNA 1459 | 1459 | 6949 |
| siRNA 1460 | 1460 | 6950 |
| siRNA 1461 | 1461 | 6951 |
| siRNA 1462 | 1462 | 6952 |
| siRNA 1463 | 1463 | 6953 |
| siRNA 1465 | 1465 | 6955 |
| siRNA 1466 | 1466 | 6956 |
| siRNA 1467 | 1467 | 6957 |
| siRNA 1468 | 1468 | 6958 |
| siRNA 1469 | 1469 | 6959 |
| siRNA 1470 | 1470 | 6960 |
| siRNA 1472 | 1472 | 6962 |
| siRNA 1473 | 1473 | 6963 |
| siRNA 1474 | 1474 | 6964 |
| siRNA 1475 | 1475 | 6965 |
| siRNA 1476 | 1476 | 6966 |
| siRNA 1477 | 1477 | 6967 |
| siRNA 1481 | 1481 | 6971 |
| siRNA 1494 | 1494 | 6984 |
| siRNA 1495 | 1495 | 6985 |
| siRNA 1498 | 1498 | 6988 |
| siRNA 1503 | 1503 | 6993 |
| siRNA 1504 | 1504 | 6994 |
| siRNA 1505 | 1505 | 6995 |
| siRNA 1510 | 1510 | 7000 |
| siRNA 1521 | 1521 | 7011 |
| siRNA 1529 | 1529 | 7019 |
| siRNA 1533 | 1533 | 7023 |
| siRNA 1535 | 1535 | 7025 |
| siRNA 1560 | 1560 | 7050 |
| siRNA 1568 | 1568 | 7058 |
| siRNA 1569 | 1569 | 7059 |
| siRNA 1570 | 1570 | 7060 |
| siRNA 1572 | 1572 | 7062 |
| siRNA 1575 | 1575 | 7065 |
| siRNA 1587 | 1587 | 7077 |
| siRNA 1588 | 1588 | 7078 |
| siRNA 1589 | 1589 | 7079 |
| siRNA 1596 | 1596 | 7086 |
| siRNA 1614 | 1614 | 7104 |
| siRNA 1621 | 1621 | 7111 |
| siRNA 1622 | 1622 | 7112 |
| siRNA 1623 | 1623 | 7113 |
| siRNA 1627 | 1627 | 7117 |
| siRNA 1628 | 1628 | 7118 |
| siRNA 1631 | 1631 | 7121 |
| siRNA 1632 | 1632 | 7122 |
| siRNA 1633 | 1633 | 7123 |
| siRNA 1634 | 1634 | 7124 |
| siRNA 1635 | 1635 | 7125 |
| siRNA 1636 | 1636 | 7126 |
| siRNA 1637 | 1637 | 7127 |
| siRNA 1638 | 1638 | 7128 |
| siRNA 1641 | 1641 | 7131 |
| siRNA 1643 | 1643 | 7133 |
| siRNA 1644 | 1644 | 7134 |
| siRNA 1645 | 1645 | 7135 |
| siRNA 1648 | 1648 | 7138 |
| siRNA 1649 | 1649 | 7139 |
| siRNA 1650 | 1650 | 7140 |
| siRNA 1651 | 1651 | 7141 |
| siRNA 1652 | 1652 | 7142 |
| siRNA 1654 | 1654 | 7144 |
| siRNA 1655 | 1655 | 7145 |
| siRNA 1656 | 1656 | 7146 |
| siRNA 1658 | 1658 | 7148 |
| siRNA 1659 | 1659 | 7149 |
| siRNA 1683 | 1683 | 7173 |
| siRNA 1684 | 1684 | 7174 |
| siRNA 1689 | 1689 | 7179 |
| siRNA 1691 | 1691 | 7181 |
| siRNA 1693 | 1693 | 7183 |
| siRNA 1697 | 1697 | 7187 |
| siRNA 1699 | 1699 | 7189 |
| siRNA 1703 | 1703 | 7193 |
| siRNA 1706 | 1706 | 7196 |
| siRNA 1707 | 1707 | 7197 |
| siRNA 1708 | 1708 | 7198 |
| siRNA 1712 | 1712 | 7202 |
| siRNA 1720 | 1720 | 7210 |
| siRNA 1763 | 1763 | 7253 |
| siRNA 1802 | 1802 | 7292 |
| siRNA 1805 | 1805 | 7295 |
| siRNA 1806 | 1806 | 7296 |
| siRNA 1811 | 1811 | 7301 |
| siRNA 1812 | 1812 | 7302 |
| siRNA 1814 | 1814 | 7304 |
| siRNA 1816 | 1816 | 7306 |
| siRNA 1821 | 1821 | 7311 |
| siRNA 1825 | 1825 | 7315 |
| siRNA 1826 | 1826 | 7316 |
| siRNA 1832 | 1832 | 7322 |
| siRNA 1834 | 1834 | 7324 |
| siRNA 1844 | 1844 | 7334 |
| siRNA 1846 | 1846 | 7336 |
| siRNA 1847 | 1847 | 7337 |
| siRNA 1851 | 1851 | 7341 |
| siRNA 1857 | 1857 | 7347 |
| siRNA 1861 | 1861 | 7351 |
| siRNA 1865 | 1865 | 7355 |
| siRNA 1897 | 1897 | 7387 |
| siRNA 1909 | 1909 | 7399 |
| siRNA 1912 | 1912 | 7402 |
| siRNA 1914 | 1914 | 7404 |
| siRNA 1915 | 1915 | 7405 |
| siRNA 1916 | 1916 | 7406 |
| siRNA 1917 | 1917 | 7407 |
| siRNA 1918 | 1918 | 7408 |
| siRNA 1919 | 1919 | 7409 |
| siRNA 1920 | 1920 | 7410 |
| siRNA 1921 | 1921 | 7411 |
| siRNA 1922 | 1922 | 7412 |
| siRNA 1923 | 1923 | 7413 |
| siRNA 1924 | 1924 | 7414 |
| siRNA 1926 | 1926 | 7416 |
| siRNA 1927 | 1927 | 7417 |
| siRNA 1928 | 1928 | 7418 |
| siRNA 1929 | 1929 | 7419 |
| siRNA 1934 | 1934 | 7424 |
| siRNA 1935 | 1935 | 7425 |
| siRNA 1936 | 1936 | 7426 |
| siRNA 1937 | 1937 | 7427 |
| siRNA 1938 | 1938 | 7428 |
| siRNA 1940 | 1940 | 7430 |
| siRNA 1941 | 1941 | 7431 |
| siRNA 1948 | 1948 | 7438 |
| siRNA 1951 | 1951 | 7441 |
| siRNA 1977 | 1977 | 7467 |
| siRNA 1980 | 1980 | 7470 |
| siRNA 1981 | 1981 | 7471 |
| siRNA 1984 | 1984 | 7474 |
| siRNA 1985 | 1985 | 7475 |
| siRNA 1986 | 1986 | 7476 |
| siRNA 1987 | 1987 | 7477 |
| siRNA 1988 | 1988 | 7478 |
| siRNA 1989 | 1989 | 7479 |
| siRNA 1991 | 1991 | 7481 |
| siRNA 1992 | 1992 | 7482 |
| siRNA 1994 | 1994 | 7484 |
| siRNA 1995 | 1995 | 7485 |
| siRNA 1996 | 1996 | 7486 |
| siRNA 1999 | 1999 | 7489 |
| siRNA 2000 | 2000 | 7490 |
| siRNA 2002 | 2002 | 7492 |
| siRNA 2005 | 2005 | 7495 |
| siRNA 2006 | 2006 | 7496 |
| siRNA 2007 | 2007 | 7497 |
| siRNA 2014 | 2014 | 7504 |
| siRNA 2020 | 2020 | 7510 |
| siRNA 2049 | 2049 | 7539 |
| siRNA 2051 | 2051 | 7541 |
| siRNA 2056 | 2056 | 7546 |
| siRNA 2057 | 2057 | 7547 |
| siRNA 2062 | 2062 | 7552 |
| siRNA 2065 | 2065 | 7555 |
| siRNA 2071 | 2071 | 7561 |
| siRNA 2073 | 2073 | 7563 |
| siRNA 2074 | 2074 | 7564 |
| siRNA 2077 | 2077 | 7567 |
| siRNA 2088 | 2088 | 7578 |
| siRNA 2096 | 2096 | 7586 |
| siRNA 2109 | 2109 | 7599 |
| siRNA 2112 | 2112 | 7602 |
| siRNA 2116 | 2116 | 7606 |
| siRNA 2120 | 2120 | 7610 |
| siRNA 2142 | 2142 | 7632 |
| siRNA 2147 | 2147 | 7637 |
| siRNA 2148 | 2148 | 7638 |
| siRNA 2149 | 2149 | 7639 |
| siRNA 2150 | 2150 | 7640 |
| siRNA 2151 | 2151 | 7641 |
| siRNA 2152 | 2152 | 7642 |
| siRNA 2154 | 2154 | 7644 |
| siRNA 2157 | 2157 | 7647 |
| siRNA 2158 | 2158 | 7648 |
| siRNA 2161 | 2161 | 7651 |
| siRNA 2164 | 2164 | 7654 |
| siRNA 2167 | 2167 | 7657 |
| siRNA 2168 | 2168 | 7658 |
| siRNA 2170 | 2170 | 7660 |
| siRNA 2171 | 2171 | 7661 |
| siRNA 2172 | 2172 | 7662 |
| siRNA 2175 | 2175 | 7665 |
| siRNA 2193 | 2193 | 7683 |
| siRNA 2202 | 2202 | 7692 |
| siRNA 2209 | 2209 | 7699 |
| siRNA 2213 | 2213 | 7703 |
| siRNA 2214 | 2214 | 7704 |
| siRNA 2216 | 2216 | 7706 |
| siRNA 2219 | 2219 | 7709 |
| siRNA 2220 | 2220 | 7710 |
| siRNA 2244 | 2244 | 7734 |
| siRNA 2245 | 2245 | 7735 |
| siRNA 2246 | 2246 | 7736 |
| siRNA 2250 | 2250 | 7740 |
| siRNA 2251 | 2251 | 7741 |
| siRNA 2252 | 2252 | 7742 |
| siRNA 2254 | 2254 | 7744 |
| siRNA 2257 | 2257 | 7747 |
| siRNA 2258 | 2258 | 7748 |
| siRNA 2259 | 2259 | 7749 |
| siRNA 2286 | 2286 | 7776 |
| siRNA 2287 | 2287 | 7777 |
| siRNA 2292 | 2292 | 7782 |
| siRNA 2294 | 2294 | 7784 |
| siRNA 2306 | 2306 | 7796 |
| siRNA 2307 | 2307 | 7797 |
| siRNA 2310 | 2310 | 7800 |
| siRNA 2311 | 2311 | 7801 |
| siRNA 2312 | 2312 | 7802 |
| siRNA 2313 | 2313 | 7803 |
| siRNA 2314 | 2314 | 7804 |
| siRNA 2318 | 2318 | 7808 |
| siRNA 2322 | 2322 | 7812 |
| siRNA 2324 | 2324 | 7814 |
| siRNA 2328 | 2328 | 7818 |
| siRNA 2329 | 2329 | 7819 |
| siRNA 2332 | 2332 | 7822 |
| siRNA 2336 | 2336 | 7826 |
| siRNA 2338 | 2338 | 7828 |
| siRNA 2339 | 2339 | 7829 |
| siRNA 2340 | 2340 | 7830 |
| siRNA 2355 | 2355 | 7845 |
| siRNA 2356 | 2356 | 7846 |
| siRNA 2357 | 2357 | 7847 |
| siRNA 2360 | 2360 | 7850 |
| siRNA 2362 | 2362 | 7852 |
| siRNA 2364 | 2364 | 7854 |
| siRNA 2365 | 2365 | 7855 |
| siRNA 2366 | 2366 | 7856 |
| siRNA 2368 | 2368 | 7858 |
| siRNA 2369 | 2369 | 7859 |
| siRNA 2370 | 2370 | 7860 |
| siRNA 2393 | 2393 | 7883 |
| siRNA 2403 | 2403 | 7893 |
| siRNA 2417 | 2417 | 7907 |
| siRNA 2418 | 2418 | 7908 |
| siRNA 2436 | 2436 | 7926 |
| siRNA 2437 | 2437 | 1927 |
| siRNA 2467 | 2467 | 7957 |
| siRNA 2470 | 2470 | 7960 |
| siRNA 2471 | 2471 | 7961 |
| siRNA 2472 | 2472 | 7962 |
| siRNA 2477 | 2477 | 7967 |
| siRNA 2480 | 2480 | 7970 |
| siRNA 2483 | 2483 | 7973 |
| siRNA 2486 | 2486 | 7976 |
| siRNA 2488 | 2488 | 7978 |
| siRNA 2489 | 2489 | 7979 |
| siRNA 2490 | 2490 | 7980 |
| siRNA 2528 | 2528 | 8018 |
| siRNA 2530 | 2530 | 8020 |
| siRNA 2531 | 2531 | 8021 |
| siRNA 2532 | 2532 | 8022 |
| siRNA 2548 | 2548 | 8038 |
| siRNA 2559 | 2559 | 8049 |
| siRNA 2565 | 2565 | 8055 |
| siRNA 2568 | 2568 | 8058 |
| siRNA 2575 | 2575 | 8065 |
| siRNA 2577 | 2577 | 8067 |
| siRNA 2598 | 2598 | 8088 |
| siRNA 2610 | 2610 | 8100 |
| siRNA 2611 | 2611 | 8101 |
| siRNA 2616 | 2616 | 8106 |
| siRNA 2619 | 2619 | 8109 |
| siRNA 2620 | 2620 | 8110 |
| siRNA 2623 | 2623 | 8113 |
| siRNA 2630 | 2630 | 8120 |
| siRNA 2631 | 2631 | 8121 |
| siRNA 2632 | 2632 | 8122 |
| siRNA 2633 | 2633 | 8123 |
| siRNA 2637 | 2637 | 8127 |
| siRNA 2640 | 2640 | 8130 |
| siRNA 2642 | 2642 | 8132 |
| siRNA 2644 | 2644 | 8134 |
| siRNA 2645 | 2645 | 8135 |
| siRNA 2646 | 2646 | 8136 |
| siRNA 2673 | 2673 | 8163 |
| siRNA 2675 | 2675 | 8165 |
| siRNA 2679 | 2679 | 8169 |
| siRNA 2680 | 2680 | 8170 |
| siRNA 2682 | 2682 | 8172 |
| siRNA 2683 | 2683 | 8173 |
| siRNA 2688 | 2688 | 8178 |
| siRNA 2690 | 2690 | 8180 |
| siRNA 2691 | 2691 | 8181 |
| siRNA 2699 | 2699 | 8189 |
| siRNA 2708 | 2708 | 8198 |
| siRNA 2713 | 2713 | 8203 |
| siRNA 2755 | 2755 | 8245 |
| siRNA 2756 | 2756 | 8246 |
| siRNA 2757 | 2757 | 8247 |
| siRNA 2759 | 2759 | 8249 |
| siRNA 2760 | 2760 | 8250 |
| siRNA 2761 | 2761 | 8251 |
| siRNA 2762 | 2762 | 8252 |
| siRNA 2763 | 2763 | 8253 |
| siRNA 2764 | 2764 | 8254 |
| siRNA 2767 | 2767 | 8257 |
| siRNA 2815 | 2815 | 8305 |
| siRNA 2816 | 2816 | 8306 |
| siRNA 2817 | 2817 | 8307 |
| siRNA 2821 | 2821 | 8311 |
| siRNA 2822 | 2822 | 8312 |
| siRNA 2825 | 2825 | 8315 |
| siRNA 2828 | 2828 | 8318 |
| siRNA 2829 | 2829 | 8319 |
| siRNA 2830 | 2830 | 8320 |
| siRNA 2833 | 2833 | 8323 |
| siRNA 2834 | 2834 | 8324 |
| siRNA 2836 | 2836 | 8326 |
| siRNA 2841 | 2841 | 8331 |
| siRNA 2842 | 2842 | 8332 |
| siRNA 2847 | 2847 | 8337 |
| siRNA 2866 | 2866 | 8356 |
| siRNA 2882 | 2882 | 8372 |
| siRNA 2883 | 2883 | 8373 |
| siRNA 2884 | 2884 | 8374 |
| siRNA 2886 | 2886 | 8376 |
| siRNA 2887 | 2887 | 8377 |
| siRNA 2888 | 2888 | 8378 |
| siRNA 2890 | 2890 | 8380 |
| siRNA 2897 | 2897 | 8387 |
| siRNA 2898 | 2898 | 8388 |
| siRNA 2902 | 2902 | 8392 |
| siRNA 2903 | 2903 | 8393 |
| siRNA 2908 | 2908 | 8398 |
| siRNA 2917 | 2917 | 8407 |
| siRNA 2926 | 2926 | 8416 |
| siRNA 2928 | 2928 | 8418 |
| siRNA 2929 | 2929 | 8419 |
| siRNA 2930 | 2930 | 8420 |
| siRNA 2932 | 2932 | 8422 |
| siRNA 2933 | 2933 | 8423 |
| siRNA 2937 | 2937 | 8427 |
| siRNA 2938 | 2938 | 8428 |
| siRNA 2939 | 2939 | 8429 |
| siRNA 2940 | 2940 | 8430 |
| siRNA 2942 | 2942 | 8432 |
| siRNA 2944 | 2944 | 8434 |
| siRNA 2946 | 2946 | 8436 |
| siRNA 2947 | 2947 | 8437 |
| siRNA 2949 | 2949 | 8439 |
| siRNA 2952 | 2952 | 8442 |
| siRNA 2981 | 2981 | 8471 |
| siRNA 2982 | 2982 | 8472 |
| siRNA 2983 | 2983 | 8473 |
| siRNA 2984 | 2984 | 8474 |
| siRNA 2985 | 2985 | 8475 |
| siRNA 2986 | 2986 | 8476 |
| siRNA 2987 | 2987 | 8477 |
| siRNA 2998 | 2998 | 8488 |
| siRNA 3006 | 3006 | 8496 |
| siRNA 3024 | 3024 | 8514 |
| siRNA 3025 | 3025 | 8515 |
| siRNA 3035 | 3035 | 8525 |
| siRNA 3038 | 3038 | 8528 |
| siRNA 3042 | 3042 | 8532 |
| siRNA 3046 | 3046 | 8536 |
| siRNA 3053 | 3053 | 8543 |
| siRNA 3091 | 3091 | 8581 |
| siRNA 3093 | 3093 | 8583 |
| siRNA 3094 | 3094 | 8584 |
| siRNA 3098 | 3098 | 8588 |
| siRNA 3099 | 3099 | 8589 |
| siRNA 3108 | 3108 | 8598 |
| siRNA 3140 | 3140 | 8630 |
| siRNA 3146 | 3146 | 8636 |
| siRNA 3156 | 3156 | 8646 |
| siRNA 3164 | 3164 | 8654 |
| siRNA 3200 | 3200 | 8690 |
| siRNA 3209 | 3209 | 8699 |
| siRNA 3218 | 3218 | 8708 |
| siRNA 3221 | 3221 | 8711 |
| siRNA 3222 | 3222 | 8712 |
| siRNA 3223 | 3223 | 8713 |
| siRNA 3224 | 3224 | 8714 |
| siRNA 3230 | 3230 | 8720 |
| siRNA 3231 | 3231 | 8721 |
| siRNA 3232 | 3232 | 8722 |
| siRNA 3238 | 3238 | 8728 |
| siRNA 3247 | 3247 | 8737 |
| siRNA 3259 | 3259 | 8749 |
| siRNA 3261 | 3261 | 8751 |
| siRNA 3262 | 3262 | 8752 |
| siRNA 3263 | 3263 | 8753 |
| siRNA 3276 | 3276 | 8766 |
| siRNA 3277 | 3277 | 8767 |
| siRNA 3305 | 3305 | 8795 |
| siRNA 3310 | 3310 | 8800 |
| siRNA 3315 | 3315 | 8805 |
| siRNA 3330 | 3330 | 8820 |
| siRNA 3333 | 3333 | 8823 |
| siRNA 3334 | 3334 | 8824 |
| siRNA 3335 | 3335 | 8825 |
| siRNA 3339 | 3339 | 8829 |
| siRNA 3342 | 3342 | 8832 |
| siRNA 3349 | 3349 | 8839 |
| siRNA 3350 | 3350 | 8840 |
| siRNA 3351 | 3351 | 8841 |
| siRNA 3352 | 3352 | 8842 |
| siRNA 3353 | 3353 | 8843 |
| siRNA 3354 | 3354 | 8844 |
| siRNA 3355 | 3355 | 8845 |
| siRNA 3357 | 3357 | 8847 |
| siRNA 3358 | 3358 | 8848 |
| siRNA 3359 | 3359 | 8849 |
| siRNA 3360 | 3360 | 8850 |
| siRNA 3364 | 3364 | 8854 |
| siRNA 3396 | 3396 | 8886 |
| siRNA 3397 | 3397 | 8887 |
| siRNA 3403 | 3403 | 8893 |
| siRNA 3405 | 3405 | 8895 |
| siRNA 3406 | 3406 | 8896 |
| siRNA 3407 | 3407 | 8897 |
| siRNA 3410 | 3410 | 8900 |
| siRNA 3411 | 3411 | 8901 |
| siRNA 3412 | 3412 | 8902 |
| siRNA 3413 | 3413 | 8903 |
| siRNA 3415 | 3415 | 8905 |
| siRNA 3416 | 3416 | 8906 |
| siRNA 3417 | 3417 | 8907 |
| siRNA 3418 | 3418 | 8908 |
| siRNA 3425 | 3425 | 8915 |
| siRNA 3431 | 3431 | 8921 |
| siRNA 3432 | 3432 | 8922 |
| siRNA 3435 | 3435 | 8925 |
| siRNA 3436 | 3436 | 8926 |
| siRNA 3437 | 3437 | 8927 |
| siRNA 3438 | 3438 | 8928 |
| siRNA 3439 | 3439 | 8929 |
| siRNA 3443 | 3443 | 8933 |
| siRNA 3444 | 3444 | 8934 |
| siRNA 3449 | 3449 | 8939 |
| siRNA 3450 | 3450 | 8940 |
| siRNA 3451 | 3451 | 8941 |
| siRNA 3456 | 3456 | 8946 |
| siRNA 3457 | 3457 | 8947 |
| siRNA 3458 | 3458 | 8948 |
| siRNA 3460 | 3460 | 8950 |
| siRNA 3461 | 3461 | 8951 |
| siRNA 3470 | 3470 | 8960 |
| siRNA 3471 | 3471 | 8961 |
| siRNA 3472 | 3472 | 8962 |
| siRNA 3484 | 3484 | 8974 |
| siRNA 3487 | 3487 | 8977 |
| siRNA 3488 | 3488 | 8978 |
| siRNA 3489 | 3489 | 8979 |
| siRNA 3490 | 3490 | 8980 |
| siRNA 3491 | 3491 | 8981 |
| siRNA 3492 | 3492 | 8982 |
| siRNA 3494 | 3494 | 8984 |
| siRNA 3495 | 3495 | 8985 |
| siRNA 3500 | 3500 | 8990 |
| siRNA 3502 | 3502 | 8992 |
| siRNA 3504 | 3504 | 8994 |
| siRNA 3511 | 3511 | 9001 |
| siRNA 3512 | 3512 | 9002 |
| siRNA 3516 | 3516 | 9006 |
| siRNA 3517 | 3517 | 9007 |
| siRNA 3540 | 3540 | 9030 |
| siRNA 3546 | 3546 | 9036 |
| siRNA 3549 | 3549 | 9039 |
| siRNA 3558 | 3558 | 9048 |
| siRNA 3560 | 3560 | 9050 |
| siRNA 3561 | 3561 | 9051 |
| siRNA 3564 | 3564 | 9054 |
| siRNA 3566 | 3566 | 9056 |
| siRNA 3576 | 3576 | 9066 |
| siRNA 3582 | 3582 | 9072 |
| siRNA 3583 | 3583 | 9073 |
| siRNA 3585 | 3585 | 9075 |
| siRNA 3586 | 3586 | 9076 |
| siRNA 3587 | 3587 | 9077 |
| siRNA 3602 | 3602 | 9092 |
| siRNA 3604 | 3604 | 9094 |
| siRNA 3605 | 3605 | 9095 |
| siRNA 3610 | 3610 | 9100 |
| siRNA 3619 | 3619 | 9109 |
| siRNA 3629 | 3629 | 9119 |
| siRNA 3634 | 3634 | 9124 |
| siRNA 3635 | 3635 | 9125 |
| siRNA 3637 | 3637 | 9127 |
| siRNA 3638 | 3638 | 9128 |
| siRNA 3639 | 3639 | 9129 |
| siRNA 3640 | 3640 | 9130 |
| siRNA 3641 | 3641 | 9131 |
| siRNA 3663 | 3663 | 9153 |
| siRNA 3677 | 3677 | 9167 |
| siRNA 3685 | 3685 | 9175 |
| siRNA 3686 | 3686 | 9176 |
| siRNA 3688 | 3688 | 9178 |
| siRNA 3691 | 3691 | 9181 |
| siRNA 3692 | 3692 | 9182 |
| siRNA 3695 | 3695 | 9185 |
| siRNA 3703 | 3703 | 9193 |
| siRNA 3709 | 3709 | 9199 |
| siRNA 3712 | 3712 | 9202 |
| siRNA 3746 | 3746 | 9236 |
| siRNA 3747 | 3747 | 9237 |
| siRNA 3748 | 3748 | 9238 |
| siRNA 3756 | 3756 | 9246 |
| siRNA 3792 | 3792 | 9282 |
| siRNA 3802 | 3802 | 9292 |
| siRNA 3803 | 3803 | 9293 |
| siRNA 3807 | 3807 | 9297 |
| siRNA 3810 | 3810 | 9300 |
| siRNA 3816 | 3816 | 9306 |
| siRNA 3838 | 3838 | 9328 |
| siRNA 3840 | 3840 | 9330 |
| siRNA 3841 | 3841 | 9331 |
| siRNA 3868 | 3868 | 9358 |
| siRNA 3869 | 3869 | 9359 |
| siRNA 3874 | 3874 | 9364 |
| siRNA 3875 | 3875 | 9365 |
| siRNA 3883 | 3883 | 9373 |
| siRNA 3897 | 3897 | 9387 |
| siRNA 3908 | 3908 | 9398 |
| siRNA 3909 | 3909 | 9399 |
| siRNA 3911 | 3911 | 9401 |
| siRNA 3912 | 3912 | 9402 |
| siRNA 3922 | 3922 | 9412 |
| siRNA 3926 | 3926 | 9416 |
| siRNA 3934 | 3934 | 9424 |
| siRNA 3936 | 3936 | 9426 |
| siRNA 3943 | 3943 | 9433 |
| siRNA 3944 | 3944 | 9434 |
| siRNA 3945 | 3945 | 9435 |
| siRNA 3960 | 3960 | 9450 |
| siRNA 3969 | 3969 | 9459 |
| siRNA 3970 | 3970 | 9460 |
| siRNA 3988 | 3988 | 9478 |
| siRNA 3991 | 3991 | 9481 |
| siRNA 4010 | 4010 | 9500 |
| siRNA 4025 | 4025 | 9515 |
| siRNA 4027 | 4027 | 9517 |
| siRNA 4036 | 4036 | 9526 |
| siRNA 4038 | 4038 | 9528 |
| siRNA 4040 | 4040 | 9530 |
| siRNA 4041 | 4041 | 9531 |
| siRNA 4043 | 4043 | 9533 |
| siRNA 4044 | 4044 | 9534 |
| siRNA 4047 | 4047 | 9537 |
| siRNA 4048 | 4048 | 9538 |
| siRNA 4049 | 4049 | 9539 |
| siRNA 4050 | 4050 | 9540 |
| siRNA 4051 | 4051 | 9541 |
| siRNA 4052 | 4052 | 9542 |
| siRNA 4053 | 4053 | 9543 |
| siRNA 4054 | 4054 | 9544 |
| siRNA 4056 | 4056 | 9546 |
| siRNA 4058 | 4058 | 9548 |
| siRNA 4064 | 4064 | 9554 |
| siRNA 4068 | 4068 | 9558 |
| siRNA 4070 | 4070 | 9560 |
| siRNA 4077 | 4077 | 9567 |
| siRNA 4083 | 4083 | 9573 |
| siRNA 4111 | 4111 | 9601 |
| siRNA 4112 | 4112 | 9602 |
| siRNA 4117 | 4117 | 9607 |
| siRNA 4122 | 4122 | 9612 |
| siRNA 4125 | 4125 | 9615 |
| siRNA 4132 | 4132 | 9622 |
| siRNA 4133 | 4133 | 9623 |
| siRNA 4138 | 4138 | 9628 |
| siRNA 4169 | 4169 | 9659 |
| siRNA 4179 | 4179 | 9669 |
| siRNA 4190 | 4190 | 9680 |
| siRNA 4192 | 4192 | 9682 |
| siRNA 4199 | 4199 | 9689 |
| siRNA 4207 | 4207 | 9697 |
| siRNA 4209 | 4209 | 9699 |
| siRNA 4210 | 4210 | 9700 |
| siRNA 4211 | 4211 | 9701 |
| siRNA 4212 | 4212 | 9702 |
| siRNA 4213 | 4213 | 9703 |
| siRNA 4214 | 4214 | 9704 |
| siRNA 4216 | 4216 | 9706 |
| siRNA 4218 | 4218 | 9708 |
| siRNA 4219 | 4219 | 9709 |
| siRNA 4222 | 4222 | 9712 |
| siRNA 4223 | 4223 | 9713 |
| siRNA 4224 | 4224 | 9714 |
| siRNA 4225 | 4225 | 9715 |
| siRNA 4226 | 4226 | 9716 |
| siRNA 4228 | 4228 | 9718 |
| siRNA 4233 | 4233 | 9723 |
| siRNA 4235 | 4235 | 9725 |
| siRNA 4237 | 4237 | 9727 |
| siRNA 4238 | 4238 | 9728 |
| siRNA 4242 | 4242 | 9732 |
| siRNA 4243 | 4243 | 9733 |
| siRNA 4245 | 4245 | 9735 |
| siRNA 4247 | 4247 | 9737 |
| siRNA 4252 | 4252 | 9742 |
| siRNA 4254 | 4254 | 9744 |
| siRNA 4275 | 4275 | 9765 |
| siRNA 4276 | 4276 | 9766 |
| siRNA 4277 | 4277 | 9767 |
| siRNA 4279 | 4279 | 9769 |
| siRNA 4282 | 4282 | 9772 |
| siRNA 4283 | 4283 | 9773 |
| siRNA 4284 | 4284 | 9774 |
| siRNA 4290 | 4290 | 9780 |
| siRNA 4292 | 4292 | 9782 |
| siRNA 4293 | 4293 | 9783 |
| siRNA 4294 | 4294 | 9784 |
| siRNA 4295 | 4295 | 9785 |
| siRNA 4296 | 4296 | 9786 |
| siRNA 4297 | 4297 | 9787 |
| siRNA 4305 | 4305 | 9795 |
| siRNA 4309 | 4309 | 9799 |
| siRNA 4313 | 4313 | 9803 |
| siRNA 4319 | 4319 | 9809 |
| siRNA 4322 | 4322 | 9812 |
| siRNA 4351 | 4351 | 9841 |
| siRNA 4356 | 4356 | 9846 |
| siRNA 4368 | 4368 | 9858 |
| siRNA 4382 | 4382 | 9872 |
| siRNA 4388 | 4388 | 9878 |
| siRNA 4409 | 4409 | 9899 |
| siRNA 4414 | 4414 | 9904 |
| siRNA 4453 | 4453 | 9943 |
| siRNA 4455 | 4455 | 9945 |
| siRNA 4456 | 4456 | 9946 |
| siRNA 4459 | 4459 | 9949 |
| siRNA 4460 | 4460 | 9950 |
| siRNA 4467 | 4467 | 9957 |
| siRNA 4468 | 4468 | 9958 |
| siRNA 4474 | 4474 | 9964 |
| siRNA 4475 | 4475 | 9965 |
| siRNA 4481 | 4481 | 9971 |
| siRNA 4482 | 4482 | 9972 |
| siRNA 4487 | 4487 | 9977 |
| siRNA 4488 | 4488 | 9978 |
| siRNA 4489 | 4489 | 9979 |
| siRNA 4490 | 4490 | 9980 |
| siRNA 4491 | 4491 | 9981 |
| siRNA 4492 | 4492 | 9982 |
| siRNA 4496 | 4496 | 9986 |
| siRNA 4518 | 4518 | 10008 |
| siRNA 4519 | 4519 | 10009 |
| siRNA 4521 | 4521 | 10011 |
| siRNA 4527 | 4527 | 10017 |
| siRNA 4545 | 4545 | 10035 |
| siRNA 4547 | 4547 | 10037 |
| siRNA 4551 | 4551 | 10041 |
| siRNA 4552 | 4552 | 10042 |
| siRNA 4561 | 4561 | 10051 |
| siRNA 4565 | 4565 | 10055 |
| siRNA 4576 | 4576 | 10066 |
| siRNA 4584 | 4584 | 10074 |
| siRNA 4593 | 4593 | 10083 |
| siRNA 4594 | 4594 | 10084 |
| siRNA 4595 | 4595 | 10085 |
| siRNA 4596 | 4596 | 10086 |
| siRNA 4597 | 4597 | 10087 |
| siRNA 4598 | 4598 | 10088 |
| siRNA 4599 | 4599 | 10089 |
| siRNA 4600 | 4600 | 10090 |
| siRNA 4601 | 4601 | 10091 |
| siRNA 4628 | 4628 | 10118 |
| siRNA 4629 | 4629 | 10119 |
| siRNA 4644 | 4644 | 10134 |
| siRNA 4674 | 4674 | 10164 |
| siRNA 4675 | 4675 | 10165 |
| siRNA 4679 | 4679 | 10169 |
| siRNA 4680 | 4680 | 10170 |
| siRNA 4682 | 4682 | 10172 |
| siRNA 4705 | 4705 | 10195 |
| siRNA 4726 | 4726 | 10216 |
| siRNA 4739 | 4739 | 10229 |
| siRNA 4742 | 4742 | 10232 |
| siRNA 4749 | 4749 | 10239 |
| siRNA 4754 | 4754 | 10244 |
| siRNA 4756 | 4756 | 10246 |
| siRNA 4758 | 4758 | 10248 |
| siRNA 4763 | 4763 | 10253 |
| siRNA 4765 | 4765 | 10255 |
| siRNA 4767 | 4767 | 10257 |
| siRNA 4770 | 4770 | 10260 |
| siRNA 4788 | 4788 | 10278 |
| siRNA 4797 | 4797 | 10287 |
| siRNA 4799 | 4799 | 10289 |
| siRNA 4800 | 4800 | 10290 |
| siRNA 4802 | 4802 | 10292 |
| siRNA 4805 | 4805 | 10295 |
| siRNA 4807 | 4807 | 10297 |
| siRNA 4852 | 4852 | 10342 |
| siRNA 4862 | 4862 | 10352 |
| siRNA 4863 | 4863 | 10353 |
| siRNA 4902 | 4902 | 10392 |
| siRNA 4903 | 4903 | 10393 |
| siRNA 4905 | 4905 | 10395 |
| siRNA 4906 | 4906 | 10396 |
| siRNA 4910 | 4910 | 10400 |
| siRNA 4911 | 4911 | 10401 |
| siRNA 4915 | 4915 | 10405 |
| siRNA 4932 | 4932 | 10422 |
| siRNA 4934 | 4934 | 10424 |
| siRNA 4935 | 4935 | 10425 |
| siRNA 4936 | 4936 | 10426 |
| siRNA 4943 | 4943 | 10433 |
| siRNA 4945 | 4945 | 10435 |
| siRNA 4947 | 4947 | 10437 |
| siRNA 4975 | 4975 | 10465 |
| siRNA 4976 | 4976 | 10466 |
| siRNA 4977 | 4977 | 10467 |
| siRNA 4981 | 4981 | 10471 |
| siRNA 4982 | 4982 | 10472 |
| siRNA 4983 | 4983 | 10473 |
| siRNA 4984 | 4984 | 10474 |
| siRNA 4989 | 4989 | 10479 |
| siRNA 4990 | 4990 | 10480 |
| siRNA 4991 | 4991 | 10481 |
| siRNA 4992 | 4992 | 10482 |
| siRNA 4993 | 4993 | 10483 |
| siRNA 4994 | 4994 | 10484 |
| siRNA 4996 | 4996 | 10486 |
| siRNA 4997 | 4997 | 10487 |
| siRNA 4999 | 4999 | 10489 |
| siRNA 5000 | 5000 | 10490 |
| siRNA 5001 | 5001 | 10491 |
| siRNA 5002 | 5002 | 10492 |
| siRNA 5004 | 5004 | 10494 |
| siRNA 5014 | 5014 | 10504 |
| siRNA 5017 | 5017 | 10507 |
| siRNA 5020 | 5020 | 10510 |
| siRNA 5027 | 5027 | 10517 |
| siRNA 5063 | 5063 | 10553 |
| siRNA 5071 | 5071 | 10561 |
| siRNA 5072 | 5072 | 10562 |
| siRNA 5073 | 5073 | 10563 |
| siRNA 5092 | 5092 | 10582 |
| siRNA 5097 | 5097 | 10587 |
| siRNA 5100 | 5100 | 10590 |
| siRNA 5103 | 5103 | 10593 |
| siRNA 5106 | 5106 | 10596 |
| siRNA 5109 | 5109 | 10599 |
| siRNA 5118 | 5118 | 10608 |
| siRNA 5119 | 5119 | 10609 |
| siRNA 5120 | 5120 | 10610 |
| siRNA 5124 | 5124 | 10614 |
| siRNA 5126 | 5126 | 10616 |
| siRNA 5152 | 5152 | 10642 |
| siRNA 5153 | 5153 | 10643 |
| siRNA 5157 | 5157 | 10647 |
| siRNA 5158 | 5158 | 10648 |
| siRNA 5162 | 5162 | 10652 |
| siRNA 5164 | 5164 | 10654 |
| siRNA 5166 | 5166 | 10656 |
| siRNA 5177 | 5177 | 10667 |
| siRNA 5182 | 5182 | 10672 |
| siRNA 5184 | 5184 | 10674 |
| siRNA 5186 | 5186 | 10676 |
| siRNA 5189 | 5189 | 10679 |
| siRNA 5190 | 5190 | 10680 |
| siRNA 5191 | 5191 | 10681 |
| siRNA 5193 | 5193 | 10683 |
| siRNA 5194 | 5194 | 10684 |
| siRNA 5206 | 5206 | 10696 |
| siRNA 5207 | 5207 | 10697 |
| siRNA 5208 | 5208 | 10698 |
| siRNA 5210 | 5210 | 10700 |
| siRNA 5211 | 5211 | 10701 |
| siRNA 5214 | 5214 | 10704 |
| siRNA 5216 | 5216 | 10706 |
| siRNA 5217 | 5217 | 10707 |
| siRNA 5218 | 5218 | 10708 |
| siRNA 5274 | 5274 | 10764 |
| siRNA 5280 | 5280 | 10770 |
| siRNA 5291 | 5291 | 10781 |
| siRNA 5297 | 5297 | 10787 |
| siRNA 5305 | 5305 | 10795 |
| siRNA 5306 | 5306 | 10796 |
| siRNA 5310 | 5310 | 10800 |
| siRNA 5313 | 5313 | 10803 |
| siRNA 5334 | 5334 | 10824 |
| siRNA 5335 | 5335 | 10825 |
| siRNA 5337 | 5337 | 10827 |
| siRNA 5338 | 5338 | 10828 |
| siRNA 5339 | 5339 | 10829 |
| siRNA 5340 | 5340 | 10830 |
| siRNA 5341 | 5341 | 10831 |
| siRNA 5343 | 5343 | 10833 |
| siRNA 5344 | 5344 | 10834 |
| siRNA 5346 | 5346 | 10836 |
| siRNA 5349 | 5349 | 10839 |
| siRNA 5350 | 5350 | 10840 |
| siRNA 5352 | 5352 | 10842 |
| siRNA 5363 | 5363 | 10853 |
| siRNA 5369 | 5369 | 10859 |
| siRNA 5374 | 5374 | 10864 |
| siRNA 5375 | 5375 | 10865 |
| siRNA 5385 | 5385 | 10875 |
| siRNA 5392 | 5392 | 10882 |
| siRNA 5393 | 5393 | 10883 |
| siRNA 5396 | 5396 | 10886 |
| siRNA 5400 | 5400 | 10890 |
| siRNA 5404 | 5404 | 10894 |
| siRNA 5405 | 5405 | 10895 |
| siRNA 5408 | 5408 | 10898 |
| siRNA 5409 | 5409 | 10899 |
| siRNA 5410 | 5410 | 10900 |
| siRNA 5415 | 5415 | 10905 |
| siRNA 5423 | 5423 | 10913 |
| siRNA 5427 | 5427 | 10917 |
| siRNA 5431 | 5431 | 10921 |
| siRNA 5435 | 5435 | 10925 |
| siRNA 5443 | 5443 | 10933 |
| siRNA 5449 | 5449 | 10939 |
| siRNA 5450 | 5450 | 10940 |
| siRNA 5455 | 5455 | 10945 |
| siRNA 5476 | 5476 | 10966 |
| siRNA 5478 | 5478 | 10968 |
| siRNA 5482 | 5482 | 10972 |
| siRNA 5484 | 5484 | 10974 |
| siRNA 5485 | 5485 | 10975 |

[0437] The siRNAs in subset B had the following characteristics: Cross-reactivity With 9mer in human SOS2 mRNA; Specificity category: For human: AS2 or better, SS3 or better; miRNA seeds: AS+SS strand: seed region not conserved in human, mouse, and rat and not present in >4 species; Off-target frequency: ≤20 human off-targets matched with 2 mismatches in antisense strand; and SNPs: siRNA target sites do not harbor SNPs with a MAF≤1 (pos. 2-18).

[0438] The siRNA sequences in subset B were further selected for absence of seed regions in the AS strand that are identical to a seed region of known human miRNA to yield subset C. Subset C includes 771 siRNAs whose base sequences are shown in Table 17.

TABLE 17
Subset C

| | Sense | Antisense |
|---|---|---|
| siRNA Name | SEQ ID NO: | SEQ ID NO: |
| siRNA 52 | 52 | 5542 |
| siRNA 72 | 72 | 5562 |
| siRNA 105 | 105 | 5595 |
| siRNA 106 | 106 | 5596 |
| siRNA 108 | 108 | 5598 |
| siRNA 158 | 158 | 5648 |
| siRNA 159 | 159 | 5649 |
| siRNA 160 | 160 | 5650 |
| siRNA 164 | 164 | 5654 |
| siRNA 165 | 165 | 5655 |
| siRNA 200 | 200 | 5690 |
| siRNA 224 | 224 | 5714 |
| siRNA 236 | 236 | 5726 |
| siRNA 258 | 258 | 5748 |
| siRNA 266 | 266 | 5756 |
| siRNA 275 | 275 | 5765 |
| siRNA 281 | 281 | 5771 |
| siRNA 282 | 282 | 5772 |
| siRNA 301 | 301 | 5791 |
| siRNA 303 | 303 | 5793 |
| siRNA 305 | 305 | 5795 |
| siRNA 313 | 313 | 5803 |
| siRNA 317 | 317 | 5807 |
| siRNA 331 | 331 | 5821 |
| siRNA 332 | 332 | 5822 |
| siRNA 336 | 336 | 5826 |
| siRNA 338 | 338 | 5828 |
| siRNA 342 | 342 | 5832 |
| siRNA 350 | 350 | 5840 |
| siRNA 353 | 353 | 5843 |
| siRNA 354 | 354 | 5844 |
| siRNA 356 | 356 | 5846 |
| siRNA 368 | 368 | 5858 |
| siRNA 370 | 370 | 5860 |
| siRNA 376 | 376 | 5866 |
| siRNA 381 | 381 | 5871 |
| siRNA 394 | 394 | 5884 |
| siRNA 400 | 400 | 5890 |
| siRNA 403 | 403 | 5893 |
| siRNA 404 | 404 | 5894 |
| siRNA 405 | 405 | 5895 |
| siRNA 415 | 415 | 5905 |
| siRNA 424 | 424 | 5914 |
| siRNA 457 | 457 | 5947 |
| siRNA 463 | 463 | 5953 |
| siRNA 482 | 482 | 5972 |
| siRNA 488 | 488 | 5978 |
| siRNA 494 | 494 | 5984 |
| siRNA 509 | 509 | 5999 |
| siRNA 510 | 510 | 6000 |
| siRNA 514 | 514 | 6004 |
| siRNA 523 | 523 | 6013 |
| siRNA 526 | 526 | 6016 |
| siRNA 528 | 528 | 6018 |
| siRNA 538 | 538 | 6028 |
| siRNA 541 | 541 | 6031 |
| siRNA 546 | 546 | 6036 |
| siRNA 552 | 552 | 6042 |
| siRNA 556 | 556 | 6046 |
| siRNA 562 | 562 | 6052 |
| siRNA 570 | 570 | 6060 |
| siRNA 573 | 573 | 6063 |
| siRNA 574 | 574 | 6064 |
| siRNA 575 | 575 | 6065 |
| siRNA 587 | 587 | 6077 |
| siRNA 589 | 589 | 6079 |
| siRNA 602 | 602 | 6092 |
| siRNA 617 | 617 | 6107 |
| siRNA 619 | 619 | 6109 |
| siRNA 620 | 620 | 6110 |
| siRNA 622 | 622 | 6112 |
| siRNA 627 | 627 | 6117 |
| siRNA 633 | 633 | 6123 |
| siRNA 638 | 638 | 6128 |
| siRNA 639 | 639 | 6129 |
| siRNA 640 | 640 | 6130 |
| siRNA 643 | 643 | 6133 |
| siRNA 644 | 644 | 6134 |
| siRNA 647 | 647 | 6137 |
| siRNA 650 | 650 | 6140 |
| siRNA 651 | 651 | 6141 |
| siRNA 652 | 652 | 6142 |
| siRNA 657 | 657 | 6147 |
| siRNA 660 | 660 | 6150 |
| siRNA 664 | 664 | 6154 |
| siRNA 665 | 665 | 6155 |
| siRNA 671 | 671 | 6161 |
| siRNA 678 | 678 | 6168 |
| siRNA 679 | 679 | 6169 |
| siRNA 680 | 680 | 6170 |
| siRNA 682 | 682 | 6172 |
| siRNA 685 | 685 | 6175 |
| siRNA 689 | 689 | 6179 |
| siRNA 690 | 690 | 6180 |
| siRNA 691 | 691 | 6181 |
| siRNA 692 | 692 | 6182 |
| siRNA 719 | 719 | 6209 |
| siRNA 736 | 736 | 6226 |
| siRNA 737 | 737 | 6227 |
| siRNA 738 | 738 | 6228 |
| siRNA 739 | 739 | 6229 |
| siRNA 740 | 740 | 6230 |
| siRNA 743 | 743 | 6233 |
| siRNA 744 | 744 | 6234 |
| siRNA 749 | 749 | 6239 |
| siRNA 750 | 750 | 6240 |
| siRNA 766 | 766 | 6256 |
| siRNA 771 | 771 | 6261 |
| siRNA 782 | 782 | 6272 |
| siRNA 783 | 783 | 6273 |
| siRNA 784 | 784 | 6274 |
| siRNA 785 | 785 | 6275 |
| siRNA 786 | 786 | 6276 |
| siRNA 787 | 787 | 6277 |
| siRNA 788 | 788 | 5278 |
| siRNA 789 | 789 | 6279 |
| siRNA 792 | 792 | 6282 |
| siRNA 795 | 795 | 6285 |
| siRNA 796 | 796 | 6286 |
| siRNA 797 | 797 | 6287 |
| siRNA 810 | 810 | 6300 |
| siRNA 813 | 813 | 6303 |
| siRNA 818 | 818 | 6308 |
| siRNA 819 | 819 | 6309 |
| siRNA 853 | 853 | 6343 |
| siRNA 854 | 854 | 6344 |
| siRNA 856 | 856 | 6346 |
| siRNA 857 | 857 | 6347 |
| siRNA 872 | 872 | 6362 |
| siRNA 877 | 877 | 6367 |
| siRNA 887 | 887 | 6377 |
| siRNA 888 | 888 | 6378 |
| siRNA 922 | 922 | 6412 |
| siRNA 924 | 924 | 6414 |
| siRNA 925 | 925 | 6415 |
| siRNA 926 | 926 | 6416 |
| siRNA 928 | 928 | 6418 |
| siRNA 930 | 930 | 6420 |
| siRNA 933 | 933 | 6423 |
| siRNA 934 | 934 | 6424 |
| siRNA 938 | 938 | 6428 |
| siRNA 941 | 941 | 6431 |
| siRNA 942 | 942 | 6432 |
| siRNA 953 | 953 | 6443 |
| siRNA 954 | 954 | 6444 |
| siRNA 961 | 961 | 6451 |
| siRNA 967 | 967 | 6457 |
| siRNA 973 | 973 | 6463 |
| siRNA 981 | 981 | 6471 |
| siRNA 999 | 999 | 6489 |
| siRNA 1000 | 1000 | 6490 |
| siRNA 1001 | 1001 | 6491 |
| siRNA 1006 | 1006 | 6496 |
| siRNA 1007 | 1007 | 6497 |
| siRNA 1040 | 1040 | 6530 |
| siRNA 1052 | 1052 | 6542 |
| siRNA 1053 | 1053 | 6543 |
| siRNA 1056 | 1056 | 6546 |
| siRNA 1075 | 1075 | 6565 |
| siRNA 1082 | 1082 | 6572 |
| siRNA 1084 | 1084 | 6574 |
| siRNA 1086 | 1086 | 6576 |
| siRNA 1087 | 1087 | 6577 |
| siRNA 1153 | 1153 | 6643 |
| siRNA 1156 | 1156 | 6646 |
| siRNA 1157 | 1157 | 6647 |
| siRNA 1158 | 1158 | 6648 |
| siRNA 1159 | 1159 | 6649 |
| siRNA 1175 | 1175 | 6665 |
| siRNA 1185 | 1185 | 6675 |
| siRNA 1196 | 1196 | 6686 |
| siRNA 1224 | 1224 | 6714 |
| siRNA 1255 | 1255 | 6745 |
| siRNA 1279 | 1279 | 6769 |
| siRNA 1280 | 1280 | 6770 |
| siRNA 1282 | 1282 | 6772 |
| siRNA 1286 | 1286 | 6776 |
| siRNA 1294 | 1294 | 6784 |
| siRNA 1296 | 1296 | 6786 |
| siRNA 1301 | 1301 | 6791 |
| siRNA 1302 | 1302 | 6792 |
| siRNA 1303 | 1303 | 6793 |
| siRNA 1318 | 1318 | 6808 |
| siRNA 1322 | 1322 | 6812 |
| siRNA 1343 | 1343 | 6833 |
| siRNA 1344 | 1344 | 6834 |
| siRNA 1346 | 1346 | 6836 |
| siRNA 1347 | 1347 | 6837 |
| siRNA 1363 | 1363 | 6853 |
| siRNA 1395 | 1395 | 6885 |
| siRNA 1398 | 1398 | 6888 |
| siRNA 1405 | 1405 | 6895 |
| siRNA 1406 | 1406 | 6896 |
| siRNA 1408 | 1408 | 6898 |
| siRNA 1430 | 1430 | 6920 |
| siRNA 1441 | 1441 | 6931 |
| siRNA 1442 | 1442 | 6932 |
| siRNA 1445 | 1445 | 6935 |
| siRNA 1449 | 1449 | 6939 |
| siRNA 1452 | 1452 | 6942 |
| siRNA 1453 | 1453 | 6943 |
| siRNA 1459 | 1459 | 6949 |
| siRNA 1460 | 1460 | 6950 |
| siRNA 1462 | 1462 | 6952 |
| siRNA 1463 | 1463 | 6953 |
| siRNA 1465 | 1465 | 6955 |
| siRNA 1466 | 1466 | 6956 |
| siRNA 1467 | 1467 | 6957 |
| siRNA 1468 | 1468 | 6958 |
| siRNA 1469 | 1469 | 6959 |
| siRNA 1470 | 1470 | 6960 |
| siRNA 1474 | 1474 | 6964 |
| siRNA 1475 | 1475 | 6965 |
| siRNA 1495 | 1495 | 6985 |
| siRNA 1498 | 1498 | 6988 |
| siRNA 1503 | 1503 | 6993 |
| siRNA 1505 | 1505 | 6995 |
| siRNA 1510 | 1510 | 7000 |
| siRNA 1529 | 1529 | 7019 |
| siRNA 1533 | 1533 | 7023 |
| siRNA 1535 | 1535 | 7025 |
| siRNA 1560 | 1560 | 7050 |
| siRNA 1568 | 1568 | 7058 |
| siRNA 1569 | 1569 | 7059 |
| siRNA 1570 | 1570 | 7060 |
| siRNA 1572 | 1572 | 7062 |
| siRNA 1575 | 1575 | 7065 |
| siRNA 1587 | 1587 | 7077 |
| siRNA 1589 | 1589 | 7079 |
| siRNA 1596 | 1596 | 7086 |
| siRNA 1614 | 1614 | 7104 |
| siRNA 1621 | 1621 | 7111 |
| siRNA 1622 | 1622 | 7112 |
| siRNA 1623 | 1623 | 7113 |
| siRNA 1628 | 1628 | 7118 |
| siRNA 1631 | 1631 | 7121 |
| siRNA 1632 | 1632 | 7122 |
| siRNA 1633 | 1633 | 7123 |
| siRNA 1634 | 1634 | 7124 |
| siRNA 1635 | 1635 | 7125 |
| siRNA 1636 | 1636 | 7126 |
| siRNA 1638 | 1638 | 7128 |
| siRNA 1644 | 1644 | 7134 |
| siRNA 1648 | 1648 | 7138 |
| siRNA 1649 | 1649 | 7139 |
| siRNA 1650 | 1650 | 7140 |
| siRNA 1651 | 1651 | 7141 |
| siRNA 1652 | 1652 | 7142 |
| siRNA 1654 | 1654 | 7144 |
| siRNA 1656 | 1656 | 7146 |
| siRNA 1659 | 1659 | 7149 |
| siRNA 1683 | 1683 | 7173 |
| siRNA 1684 | 1684 | 7174 |
| siRNA 1689 | 1689 | 7179 |
| siRNA 1697 | 1697 | 7187 |
| siRNA 1699 | 1699 | 7189 |
| siRNA 1706 | 1706 | 7196 |
| siRNA 1708 | 1708 | 7198 |
| siRNA 1712 | 1712 | 7202 |
| siRNA 1720 | 1720 | 7210 |
| siRNA 1802 | 1802 | 7292 |
| siRNA 1806 | 1806 | 7296 |
| siRNA 1814 | 1814 | 7304 |
| siRNA 1825 | 1825 | 7315 |
| siRNA 1826 | 1826 | 7316 |
| siRNA 1832 | 1832 | 7322 |
| siRNA 1844 | 1844 | 7334 |
| siRNA 1846 | 1846 | 7336 |
| siRNA 1851 | 1851 | 7341 |
| siRNA 1861 | 1861 | 7351 |
| siRNA 1865 | 1865 | 7355 |
| siRNA 1897 | 1897 | 7387 |
| siRNA 1909 | 1909 | 7399 |
| siRNA 1912 | 1912 | 7402 |
| siRNA 1914 | 1914 | 7404 |
| siRNA 1915 | 1915 | 7405 |
| siRNA 1916 | 1916 | 7406 |
| siRNA 1917 | 1917 | 7407 |
| siRNA 1918 | 1918 | 7408 |
| siRNA 1921 | 1921 | 7411 |
| siRNA 1922 | 1922 | 7412 |
| siRNA 1926 | 1926 | 7416 |
| siRNA 1927 | 1927 | 7417 |
| siRNA 1928 | 1928 | 7418 |
| siRNA 1929 | 1929 | 7419 |
| siRNA 1935 | 1935 | 7425 |
| siRNA 1936 | 1936 | 7426 |
| siRNA 1937 | 1937 | 7427 |
| siRNA 1938 | 1938 | 7428 |
| siRNA 1940 | 1940 | 7430 |
| siRNA 1948 | 1948 | 7438 |
| siRNA 1951 | 1951 | 7441 |
| siRNA 1980 | 1980 | 7470 |
| siRNA 1981 | 1981 | 7471 |
| siRNA 1984 | 1984 | 7474 |
| siRNA 1986 | 1986 | 7476 |
| siRNA 1987 | 1987 | 7477 |
| siRNA 1991 | 1991 | 7481 |
| siRNA 1992 | 1992 | 7482 |
| siRNA 1995 | 1995 | 7485 |
| siRNA 1996 | 1996 | 7486 |
| siRNA 1999 | 1999 | 7489 |
| siRNA 2000 | 2000 | 7490 |
| siRNA 2002 | 2002 | 7492 |
| siRNA 2005 | 2005 | 7495 |
| siRNA 2014 | 2014 | 7504 |
| siRNA 2020 | 2020 | 7510 |
| siRNA 2049 | 2049 | 7539 |
| siRNA 2051 | 2051 | 7541 |
| siRNA 2057 | 2057 | 7547 |
| siRNA 2062 | 2062 | 7552 |
| siRNA 2065 | 2065 | 7555 |
| siRNA 2073 | 2073 | 7563 |
| siRNA 2074 | 2074 | 7564 |
| siRNA 2077 | 2077 | 7567 |
| siRNA 2096 | 2096 | 7586 |
| siRNA 2112 | 2112 | 7602 |
| siRNA 2116 | 2116 | 7606 |
| siRNA 2120 | 2120 | 7610 |
| siRNA 2147 | 2147 | 7637 |
| siRNA 2148 | 2148 | 7638 |
| siRNA 2149 | 2149 | 7639 |
| siRNA 2150 | 2150 | 7640 |
| siRNA 2151 | 2151 | 7641 |
| siRNA 2154 | 2154 | 7644 |
| siRNA 2157 | 2157 | 7647 |
| siRNA 2158 | 2158 | 7648 |
| siRNA 2164 | 2164 | 7654 |
| siRNA 2167 | 2167 | 7657 |
| siRNA 2168 | 2168 | 7658 |
| siRNA 2170 | 2170 | 7660 |
| siRNA 2172 | 2172 | 7662 |
| siRNA 2193 | 2193 | 7683 |
| siRNA 2202 | 2202 | 7692 |
| siRNA 2209 | 2209 | 7699 |
| siRNA 2213 | 2213 | 7703 |
| siRNA 2214 | 2214 | 7704 |
| siRNA 2244 | 2244 | 7734 |
| siRNA 2245 | 2245 | 7735 |
| siRNA 2246 | 2246 | 7736 |
| siRNA 2251 | 2251 | 7741 |
| siRNA 2252 | 2252 | 7742 |
| siRNA 2254 | 2254 | 7744 |
| siRNA 2257 | 2257 | 7747 |
| siRNA 2286 | 2286 | 7776 |
| siRNA 2287 | 2287 | 7777 |
| siRNA 2306 | 2306 | 7796 |
| siRNA 2307 | 2307 | 7797 |
| siRNA 2312 | 2312 | 7802 |
| siRNA 2313 | 2313 | 7803 |
| siRNA 2314 | 2314 | 7804 |
| siRNA 2318 | 2318 | 7808 |
| siRNA 2322 | 2322 | 7812 |
| siRNA 2324 | 2324 | 7814 |
| siRNA 2328 | 2328 | 7818 |
| siRNA 2329 | 2329 | 7819 |
| siRNA 2332 | 2332 | 7822 |
| siRNA 2336 | 2336 | 7826 |
| siRNA 2338 | 2338 | 7828 |
| siRNA 2339 | 2339 | 7829 |
| siRNA 2340 | 2340 | 7830 |
| siRNA 2355 | 2355 | 7845 |
| siRNA 2356 | 2356 | 7846 |
| siRNA 2357 | 2357 | 7847 |
| siRNA 2360 | 2360 | 7850 |
| siRNA 2362 | 2362 | 7852 |
| siRNA 2364 | 2364 | 7854 |
| siRNA 2365 | 2365 | 7855 |
| siRNA 2366 | 2366 | 7856 |
| siRNA 2368 | 2368 | 7858 |
| siRNA 2369 | 2369 | 7859 |
| siRNA 2370 | 2370 | 7860 |
| siRNA 2403 | 2403 | 7893 |
| siRNA 2417 | 2417 | 7907 |
| siRNA 2418 | 2418 | 7908 |
| siRNA 2436 | 2436 | 7926 |
| siRNA 2470 | 2470 | 7960 |
| siRNA 2471 | 2471 | 7961 |
| siRNA 2472 | 2472 | 7962 |
| siRNA 2477 | 2477 | 7967 |
| siRNA 2480 | 2480 | 7970 |
| siRNA 2486 | 2486 | 7976 |
| siRNA 2528 | 2528 | 8018 |
| siRNA 2530 | 2530 | 8020 |
| siRNA 2531 | 2531 | 8021 |
| siRNA 2532 | 2532 | 8022 |
| siRNA 2568 | 2568 | 8058 |
| siRNA 2598 | 2598 | 8088 |
| siRNA 2619 | 2619 | 8109 |
| siRNA 2620 | 2620 | 8110 |
| siRNA 2623 | 2623 | 8113 |
| siRNA 2630 | 2630 | 8120 |
| siRNA 2631 | 2631 | 8121 |
| siRNA 2632 | 2632 | 8122 |
| siRNA 2633 | 2633 | 8123 |
| siRNA 2637 | 2637 | 8127 |
| siRNA 2645 | 2645 | 8135 |
| siRNA 2646 | 2646 | 8136 |
| siRNA 2673 | 2673 | 8163 |
| siRNA 2675 | 2675 | 8165 |
| siRNA 2679 | 2679 | 8169 |
| siRNA 2680 | 2680 | 8170 |
| siRNA 2682 | 2682 | 8172 |
| siRNA 2699 | 2699 | 8189 |
| siRNA 2708 | 2708 | 8198 |
| siRNA 2713 | 2713 | 8203 |
| siRNA 2755 | 2755 | 8245 |
| siRNA 2756 | 2756 | 8246 |
| siRNA 2757 | 2757 | 8247 |
| siRNA 2759 | 2759 | 8249 |
| siRNA 2760 | 2760 | 8250 |
| siRNA 2762 | 2762 | 8252 |
| siRNA 2763 | 2763 | 8253 |
| siRNA 2764 | 2764 | 8254 |
| siRNA 2767 | 2767 | 8257 |
| siRNA 2815 | 2815 | 8305 |
| siRNA 2816 | 2816 | 8306 |
| siRNA 2817 | 2817 | 8307 |
| siRNA 2821 | 2821 | 8311 |
| siRNA 2825 | 2825 | 8315 |
| siRNA 2828 | 2828 | 8318 |
| siRNA 2829 | 2829 | 8319 |
| siRNA 2830 | 2830 | 8320 |
| siRNA 2834 | 2834 | 8324 |
| siRNA 2836 | 2836 | 8326 |
| siRNA 2841 | 2841 | 8331 |
| siRNA 2842 | 2842 | 8332 |
| siRNA 2847 | 2847 | 8337 |
| siRNA 2866 | 2866 | 8356 |
| siRNA 2882 | 2882 | 8372 |
| siRNA 2883 | 2883 | 8373 |
| siRNA 2886 | 2886 | 8376 |
| siRNA 2888 | 2888 | 8378 |
| siRNA 2890 | 2890 | 8380 |
| siRNA 2898 | 2898 | 8388 |
| siRNA 2902 | 2902 | 8392 |
| siRNA 2908 | 2908 | 8398 |
| siRNA 2928 | 2928 | 8418 |
| siRNA 2929 | 2929 | 8419 |
| siRNA 2932 | 2932 | 8422 |
| siRNA 2938 | 2938 | 8428 |
| siRNA 2939 | 2939 | 8429 |
| siRNA 2944 | 2944 | 8434 |
| siRNA 2946 | 2946 | 8436 |
| siRNA 2947 | 2947 | 8437 |
| siRNA 2981 | 2981 | 8471 |
| siRNA 2982 | 2982 | 8472 |
| siRNA 2983 | 2983 | 8473 |
| siRNA 2984 | 2984 | 8474 |
| siRNA 2985 | 2985 | 8475 |
| siRNA 2986 | 2986 | 8476 |
| siRNA 2987 | 2987 | 8477 |
| siRNA 2998 | 2998 | 8488 |
| siRNA 3024 | 3024 | 8514 |
| siRNA 3025 | 3025 | 8515 |
| siRNA 3035 | 3035 | 8525 |
| siRNA 3038 | 3038 | 8528 |
| siRNA 3042 | 3042 | 8532 |
| siRNA 3053 | 3053 | 8543 |
| siRNA 3093 | 3093 | 8583 |
| siRNA 3094 | 3094 | 8584 |
| siRNA 3140 | 3140 | 8630 |
| siRNA 3146 | 3146 | 8636 |
| siRNA 3164 | 3164 | 8654 |
| siRNA 3209 | 3209 | 8699 |
| siRNA 3218 | 3218 | 8708 |
| siRNA 3221 | 3221 | 8711 |
| siRNA 3222 | 3222 | 8712 |
| siRNA 3223 | 3223 | 8713 |
| siRNA 3231 | 3231 | 8721 |
| siRNA 3232 | 3232 | 8722 |
| siRNA 3238 | 3238 | 8728 |
| siRNA 3247 | 3247 | 8737 |
| siRNA 3259 | 3259 | 8749 |
| siRNA 3263 | 3263 | 8753 |
| siRNA 3305 | 3305 | 8795 |
| siRNA 3310 | 3310 | 8800 |
| siRNA 3330 | 3330 | 8820 |
| siRNA 3333 | 3333 | 8823 |
| siRNA 3335 | 3335 | 8825 |
| siRNA 3339 | 3339 | 8829 |
| siRNA 3342 | 3342 | 8832 |
| siRNA 3349 | 3349 | 8839 |
| siRNA 3350 | 3350 | 8840 |
| siRNA 3351 | 3351 | 8841 |
| siRNA 3352 | 3352 | 8842 |
| siRNA 3353 | 3353 | 8843 |
| siRNA 3354 | 3354 | 8844 |
| siRNA 3357 | 3357 | 8847 |
| siRNA 3358 | 3358 | 8848 |
| siRNA 3359 | 3359 | 8849 |
| siRNA 3364 | 3364 | 8854 |
| siRNA 3396 | 3396 | 8886 |
| siRNA 3397 | 3397 | 8887 |
| siRNA 3405 | 3405 | 8895 |
| siRNA 3411 | 3411 | 8901 |
| siRNA 3412 | 3412 | 8902 |
| siRNA 3413 | 3413 | 8903 |
| siRNA 3416 | 3416 | 8906 |
| siRNA 3417 | 3417 | 8907 |
| siRNA 3418 | 3418 | 8908 |
| siRNA 3425 | 3425 | 8915 |
| siRNA 3432 | 3432 | 8922 |
| siRNA 3435 | 3435 | 8925 |
| siRNA 3436 | 3436 | 8926 |
| siRNA 3437 | 3437 | 8927 |
| siRNA 3438 | 3438 | 8928 |
| siRNA 3439 | 3439 | 8929 |
| siRNA 3444 | 3444 | 8934 |
| siRNA 3449 | 3449 | 8939 |
| siRNA 3450 | 3450 | 8940 |
| siRNA 3456 | 3456 | 8946 |
| siRNA 3457 | 3457 | 8947 |
| siRNA 3460 | 3460 | 8950 |
| siRNA 3461 | 3461 | 8951 |
| siRNA 3472 | 3472 | 8962 |
| siRNA 3487 | 3487 | 8977 |
| siRNA 3488 | 3488 | 8978 |
| siRNA 3489 | 3489 | 8979 |
| siRNA 3490 | 3490 | 8980 |
| siRNA 3491 | 3491 | 8981 |
| siRNA 3492 | 3492 | 8982 |
| siRNA 3500 | 3500 | 8990 |
| siRNA 3502 | 3502 | 8992 |
| siRNA 3512 | 3512 | 9002 |
| siRNA 3540 | 3540 | 9030 |
| siRNA 3546 | 3546 | 9036 |
| siRNA 3549 | 3549 | 9039 |
| siRNA 3560 | 3560 | 9050 |
| siRNA 3561 | 3561 | 9051 |
| siRNA 3564 | 3564 | 9054 |
| siRNA 3566 | 3566 | 9056 |
| siRNA 3582 | 3582 | 9072 |
| siRNA 3585 | 3585 | 9075 |
| siRNA 3586 | 3586 | 9076 |
| siRNA 3587 | 3587 | 9077 |
| siRNA 3602 | 3602 | 9092 |
| siRNA 3604 | 3604 | 9094 |
| siRNA 3605 | 3605 | 9095 |
| siRNA 3629 | 3629 | 9119 |
| siRNA 3634 | 3634 | 9124 |
| siRNA 3639 | 3639 | 9129 |
| siRNA 3641 | 3641 | 9131 |
| siRNA 3677 | 3677 | 9167 |
| siRNA 3686 | 3686 | 9176 |
| siRNA 3688 | 3688 | 9178 |
| siRNA 3691 | 3691 | 9181 |
| siRNA 3692 | 3692 | 9182 |
| siRNA 3695 | 3695 | 9185 |
| siRNA 3703 | 3703 | 9193 |
| siRNA 3712 | 3712 | 9202 |
| siRNA 3746 | 3746 | 9236 |
| siRNA 3747 | 3747 | 9237 |
| siRNA 3748 | 3748 | 9238 |
| siRNA 3756 | 3756 | 9246 |
| siRNA 3792 | 3792 | 9282 |
| siRNA 3802 | 3802 | 9292 |
| siRNA 3803 | 3803 | 9293 |
| siRNA 3810 | 3810 | 9300 |
| siRNA 3838 | 3838 | 9328 |
| siRNA 3869 | 3869 | 9359 |
| siRNA 3883 | 3883 | 9373 |
| siRNA 3897 | 3897 | 9387 |
| siRNA 3922 | 3922 | 9412 |
| siRNA 3934 | 3934 | 9424 |
| siRNA 3936 | 3936 | 9426 |
| siRNA 3943 | 3943 | 9433 |
| siRNA 3945 | 3945 | 9435 |
| siRNA 3960 | 3960 | 9450 |
| siRNA 3970 | 3970 | 9460 |
| siRNA 3988 | 3988 | 9478 |
| siRNA 4010 | 4010 | 9500 |
| siRNA 4025 | 4025 | 9515 |
| siRNA 4036 | 4036 | 9526 |
| siRNA 4038 | 4038 | 9528 |
| siRNA 4040 | 4040 | 9530 |
| siRNA 4041 | 4041 | 9531 |
| siRNA 4043 | 4043 | 9533 |
| siRNA 4050 | 4050 | 9540 |
| siRNA 4051 | 4051 | 9541 |
| siRNA 4052 | 4052 | 9542 |
| siRNA 4053 | 4053 | 9543 |
| siRNA 4054 | 4054 | 9544 |
| siRNA 4056 | 4056 | 9546 |
| siRNA 4058 | 4058 | 9548 |
| siRNA 4070 | 4070 | 9560 |
| siRNA 4077 | 4077 | 9567 |
| siRNA 4112 | 4112 | 9602 |
| siRNA 4125 | 4125 | 9615 |
| siRNA 4190 | 4190 | 9680 |
| siRNA 4192 | 4192 | 9682 |
| siRNA 4199 | 4199 | 9689 |
| siRNA 4207 | 4207 | 9697 |
| siRNA 4209 | 4209 | 9699 |
| siRNA 4210 | 4210 | 9700 |
| siRNA 4211 | 4211 | 9701 |
| siRNA 4214 | 4214 | 9704 |
| siRNA 4216 | 4216 | 9706 |
| siRNA 4219 | 4219 | 9709 |
| siRNA 4222 | 4222 | 9712 |
| siRNA 4223 | 4223 | 9713 |
| siRNA 4224 | 4224 | 9714 |
| siRNA 4225 | 4225 | 9715 |
| siRNA 4226 | 4226 | 9716 |
| siRNA 4228 | 4228 | 9718 |
| siRNA 4235 | 4235 | 9725 |
| siRNA 4237 | 4237 | 9727 |
| siRNA 4238 | 4238 | 9728 |
| siRNA 4242 | 4242 | 9732 |
| siRNA 4243 | 4243 | 9733 |
| siRNA 4245 | 4245 | 9735 |
| siRNA 4254 | 4254 | 9744 |
| siRNA 4275 | 4275 | 9765 |
| siRNA 4276 | 4276 | 9766 |
| siRNA 4279 | 4279 | 9769 |
| siRNA 4282 | 4282 | 9772 |
| siRNA 4284 | 4284 | 9774 |
| siRNA 4290 | 4290 | 9780 |
| siRNA 4292 | 4292 | 9782 |
| siRNA 4293 | 4293 | 9783 |
| siRNA 4294 | 4294 | 9784 |
| siRNA 4295 | 4295 | 9785 |
| siRNA 4296 | 4296 | 9786 |
| siRNA 4297 | 4297 | 9787 |
| siRNA 4309 | 4309 | 9799 |
| siRNA 4313 | 4313 | 9803 |
| siRNA 4322 | 4322 | 9812 |
| siRNA 4356 | 4356 | 9846 |
| siRNA 4368 | 4368 | 9858 |
| siRNA 4382 | 4382 | 9872 |
| siRNA 4388 | 4388 | 9878 |
| siRNA 4409 | 4409 | 9899 |
| siRNA 4453 | 4453 | 9943 |
| siRNA 4455 | 4455 | 9945 |
| siRNA 4456 | 4456 | 9946 |
| siRNA 4459 | 4459 | 9949 |
| siRNA 4460 | 4460 | 9950 |
| siRNA 4468 | 4468 | 9958 |
| siRNA 4474 | 4474 | 9964 |
| siRNA 4475 | 4475 | 9965 |
| siRNA 4481 | 4481 | 9971 |
| siRNA 4482 | 4482 | 9972 |
| siRNA 4487 | 4487 | 9977 |
| siRNA 4488 | 4488 | 9978 |
| siRNA 4490 | 4490 | 9980 |
| siRNA 4491 | 4491 | 9981 |
| siRNA 4492 | 4492 | 9982 |
| siRNA 4518 | 4518 | 10008 |
| siRNA 4519 | 4519 | 10009 |
| siRNA 4521 | 4521 | 10011 |
| siRNA 4545 | 4545 | 10035 |
| siRNA 4547 | 4547 | 10037 |
| siRNA 4561 | 4561 | 10051 |
| siRNA 4565 | 4565 | 10055 |
| siRNA 4593 | 4593 | 10083 |
| siRNA 4594 | 4594 | 10084 |
| siRNA 4595 | 4595 | 10085 |
| siRNA 4596 | 4596 | 10086 |
| siRNA 4597 | 4597 | 10087 |
| siRNA 4598 | 4598 | 10088 |
| siRNA 4628 | 4628 | 10118 |
| siRNA 4629 | 4629 | 10119 |
| siRNA 4644 | 4644 | 10134 |
| siRNA 4675 | 4675 | 10165 |
| siRNA 4679 | 4679 | 10169 |
| siRNA 4680 | 4680 | 10170 |
| siRNA 4682 | 4682 | 10172 |
| siRNA 4705 | 4705 | 10195 |
| siRNA 4726 | 4726 | 10216 |
| siRNA 4739 | 4739 | 10229 |
| siRNA 4756 | 4756 | 10246 |
| siRNA 4765 | 4765 | 10255 |
| siRNA 4767 | 4767 | 10257 |
| siRNA 4770 | 4770 | 10260 |
| siRNA 4797 | 4797 | 10287 |
| siRNA 4800 | 4800 | 10290 |
| siRNA 4802 | 4802 | 10292 |
| siRNA 4805 | 4805 | 10295 |
| siRNA 4807 | 4807 | 10297 |
| siRNA 4852 | 4852 | 10342 |
| siRNA 4862 | 4862 | 10352 |
| siRNA 4863 | 4863 | 10353 |
| siRNA 4902 | 4902 | 10392 |
| siRNA 4903 | 4903 | 10393 |
| siRNA 4905 | 4905 | 10395 |
| siRNA 4906 | 4906 | 10396 |
| siRNA 4910 | 4910 | 10400 |
| siRNA 4932 | 4932 | 10422 |
| siRNA 4934 | 4934 | 10424 |
| siRNA 4936 | 4936 | 10426 |
| siRNA 4943 | 4943 | 10433 |
| siRNA 4975 | 4975 | 10465 |
| siRNA 4977 | 4977 | 10467 |
| siRNA 4981 | 4981 | 10471 |
| siRNA 4982 | 4982 | 10472 |
| siRNA 4983 | 4983 | 10473 |
| siRNA 4984 | 4984 | 10474 |
| siRNA 4989 | 4989 | 10479 |
| siRNA 4990 | 4990 | 10480 |
| siRNA 4993 | 4993 | 10483 |
| siRNA 4996 | 4996 | 10486 |
| siRNA 4997 | 4997 | 10487 |
| siRNA 4999 | 4999 | 10489 |
| siRNA 5000 | 5000 | 10490 |
| siRNA 5001 | 5001 | 10491 |
| siRNA 5004 | 5004 | 10494 |
| siRNA 5017 | 5017 | 10507 |
| siRNA 5020 | 5020 | 10510 |
| siRNA 5027 | 5027 | 10517 |
| siRNA 5071 | 5071 | 10561 |
| siRNA 5072 | 5072 | 10562 |
| siRNA 5073 | 5073 | 10563 |
| siRNA 5092 | 5092 | 10582 |
| siRNA 5100 | 5100 | 10590 |
| siRNA 5103 | 5103 | 10593 |
| siRNA 5106 | 5106 | 10596 |
| siRNA 5118 | 5118 | 10608 |
| siRNA 5119 | 5119 | 10609 |
| siRNA 5120 | 5120 | 10610 |
| siRNA 5124 | 5124 | 10614 |
| siRNA 5126 | 5126 | 10616 |
| siRNA 5153 | 5153 | 10643 |
| siRNA 5158 | 5158 | 10648 |
| siRNA 5164 | 5164 | 10654 |
| siRNA 5182 | 5182 | 10672 |
| siRNA 5184 | 5184 | 10674 |
| siRNA 5186 | 5186 | 10676 |
| siRNA 5190 | 5190 | 10680 |
| siRNA 5191 | 5191 | 10681 |
| siRNA 5194 | 5194 | 10684 |
| siRNA 5206 | 5206 | 10696 |
| siRNA 5207 | 5207 | 10697 |
| siRNA 5208 | 5208 | 10698 |
| siRNA 5210 | 5210 | 10700 |
| siRNA 5211 | 5211 | 10701 |
| siRNA 5214 | 5214 | 10704 |
| siRNA 5217 | 5217 | 10707 |
| siRNA 5280 | 5280 | 10770 |
| siRNA 5291 | 5291 | 10781 |
| siRNA 5297 | 5297 | 10787 |
| siRNA 5305 | 5305 | 10795 |
| siRNA 5306 | 5306 | 10796 |
| siRNA 5313 | 5313 | 10803 |
| siRNA 5334 | 5334 | 10824 |
| siRNA 5335 | 5335 | 10825 |
| siRNA 5337 | 5337 | 10827 |
| siRNA 5339 | 5339 | 10829 |
| siRNA 5340 | 5340 | 10830 |
| siRNA 5341 | 5341 | 10831 |
| siRNA 5343 | 5343 | 10833 |
| siRNA 5344 | 5344 | 10834 |
| siRNA 5346 | 5346 | 10836 |
| siRNA 5349 | 5349 | 10839 |
| siRNA 5352 | 5352 | 10842 |
| siRNA 5363 | 5363 | 10853 |
| siRNA 5374 | 5374 | 10864 |
| siRNA 5375 | 5375 | 10865 |
| siRNA 5385 | 5385 | 10875 |
| siRNA 5392 | 5392 | 10882 |
| siRNA 5393 | 5393 | 10883 |
| siRNA 5404 | 5404 | 10894 |
| siRNA 5408 | 5408 | 10898 |
| siRNA 5409 | 5409 | 10899 |
| siRNA 5423 | 5423 | 10913 |
| siRNA 5431 | 5431 | 10921 |
| siRNA 5435 | 5435 | 10925 |
| siRNA 5443 | 5443 | 10933 |
| siRNA 5455 | 5455 | 10945 |
| siRNA 5478 | 5478 | 10968 |
| siRNA 5484 | 5484 | 10974 |
| siRNA 5485 | 5485 | 10975 |

[0439] The siRNAs in subset C had the following characteristics: Cross-reactivity: With 19mer in human SOS2 mRNA; Specificity category: For human: AS2 or better, SS3 or better; miRNA seeds: AS+SS strand: seed region not conserved in human, mouse, and rat and not present in ≥4 species. AS strand: seed region not identical to seed region of known human miRNA; Off-target frequency: 730 human off-targets matched with 2 mismatches by antisense strand; and SNPs: siRNA target sites do not harbor SNPs with a MAF≥1% (pos. 2-18).

[0440] The siRNA sequences in subset C were also selected for absence of seed regions in the AS or S strands that are identical to a seed region of known human miRNA in addition to having an off-target frequency of ≤30 human off-targets matched with 2 mismatches by antisense strand to yield subset D. Subset D includes 489 siRNAs whose base sequences are shown in Table 18.

TABLE 18
Subset D

| | Sense | Antisense |
|---|---|---|
| siRNA Name | SEQ ID NO: | SEQ ID NO: |
| siRNA 72 | 72 | 5562 |
| siRNA 106 | 106 | 5596 |
| siRNA 164 | 164 | 5654 |
| siRNA 224 | 224 | 5714 |
| siRNA 236 | 236 | 5726 |
| siRNA 266 | 266 | 5756 |
| siRNA 281 | 281 | 5771 |
| siRNA 282 | 282 | 5772 |
| siRNA 305 | 305 | 5795 |
| siRNA 313 | 313 | 5803 |
| siRNA 317 | 317 | 5807 |
| siRNA 336 | 336 | 5826 |
| siRNA 338 | 338 | 5828 |
| siRNA 342 | 342 | 5832 |
| siRNA 356 | 356 | 5846 |
| siRNA 381 | 381 | 5871 |
| siRNA 394 | 394 | 5884 |
| siRNA 403 | 403 | 5893 |
| siRNA 415 | 415 | 5905 |
| siRNA 457 | 457 | 5947 |
| siRNA 463 | 463 | 5953 |
| siRNA 482 | 482 | 5972 |
| siRNA 509 | 509 | 5999 |
| siRNA 510 | 510 | 6000 |
| siRNA 514 | 514 | 6004 |
| siRNA 526 | 526 | 6016 |
| siRNA 528 | 528 | 6018 |
| siRNA 538 | 538 | 6028 |
| siRNA 541 | 541 | 6031 |
| siRNA 546 | 546 | 6036 |
| siRNA 562 | 562 | 6052 |
| siRNA 570 | 570 | 6060 |
| siRNA 573 | 573 | 6063 |
| siRNA 574 | 574 | 6064 |
| siRNA 575 | 575 | 6065 |
| siRNA 587 | 587 | 6077 |
| siRNA 589 | 589 | 6079 |
| siRNA 617 | 617 | 6107 |
| siRNA 633 | 633 | 6123 |
| siRNA 639 | 639 | 6129 |
| siRNA 643 | 643 | 6133 |
| siRNA 644 | 644 | 6134 |
| siRNA 647 | 647 | 6137 |
| siRNA 650 | 650 | 6140 |
| siRNA 651 | 651 | 6141 |
| siRNA 664 | 664 | 6154 |
| siRNA 671 | 671 | 6161 |
| siRNA 679 | 679 | 6169 |
| siRNA 680 | 680 | 6170 |
| siRNA 682 | 682 | 6172 |
| siRNA 685 | 685 | 6175 |
| siRNA 689 | 689 | 6179 |
| siRNA 690 | 690 | 6180 |
| siRNA 691 | 691 | 6181 |
| siRNA 692 | 692 | 6182 |
| siRNA 719 | 719 | 6209 |
| siRNA 736 | 736 | 6226 |
| siRNA 738 | 738 | 6228 |
| siRNA 739 | 739 | 6229 |
| siRNA 740 | 740 | 6230 |
| siRNA 743 | 743 | 6233 |
| siRNA 749 | 749 | 6239 |
| siRNA 750 | 750 | 6240 |
| siRNA 766 | 766 | 6256 |
| siRNA 783 | 783 | 6273 |
| siRNA 785 | 785 | 6275 |
| siRNA 786 | 786 | 6276 |
| siRNA 787 | 787 | 6277 |
| siRNA 788 | 788 | 6278 |
| siRNA 792 | 792 | 6282 |
| siRNA 796 | 796 | 6286 |
| siRNA 797 | 797 | 6287 |
| siRNA 813 | 813 | 6303 |
| siRNA 818 | 818 | 6308 |
| siRNA 819 | 819 | 6309 |
| siRNA 854 | 854 | 6344 |
| siRNA 877 | 877 | 6367 |
| siRNA 887 | 887 | 6377 |
| siRNA 888 | 888 | 6378 |
| siRNA 922 | 922 | 6412 |
| siRNA 930 | 930 | 6420 |
| siRNA 933 | 933 | 6423 |
| siRNA 934 | 934 | 6424 |
| siRNA 941 | 941 | 6431 |
| siRNA 942 | 942 | 6432 |
| siRNA 953 | 953 | 6443 |
| siRNA 954 | 954 | 6444 |
| siRNA 961 | 961 | 6451 |
| siRNA 967 | 967 | 6457 |
| siRNA 973 | 973 | 6463 |
| siRNA 999 | 999 | 6489 |
| siRNA 1000 | 1000 | 6490 |
| siRNA 1001 | 1001 | 6491 |
| siRNA 1007 | 1007 | 6497 |
| siRNA 1040 | 1040 | 6530 |
| siRNA 1053 | 1053 | 6543 |
| siRNA 1075 | 1075 | 6565 |
| siRNA 1084 | 1084 | 6574 |
| siRNA 1086 | 1086 | 6576 |
| siRNA 1087 | 1087 | 6577 |
| siRNA 1153 | 1153 | 6643 |
| siRNA 1156 | 1156 | 6646 |
| siRNA 1157 | 1157 | 6647 |
| siRNA 1159 | 1159 | 6649 |
| siRNA 1175 | 1175 | 6665 |
| siRNA 1196 | 1196 | 6686 |
| siRNA 1224 | 1224 | 6714 |
| siRNA 1255 | 1255 | 6745 |
| siRNA 1279 | 1279 | 6769 |
| siRNA 1280 | 1280 | 6770 |
| siRNA 1294 | 1294 | 6784 |
| siRNA 1296 | 1296 | 6786 |
| siRNA 1303 | 1303 | 6793 |
| siRNA 1343 | 1343 | 6833 |
| siRNA 1346 | 1346 | 6836 |
| siRNA 1347 | 1347 | 6837 |
| siRNA 1363 | 1363 | 6853 |
| siRNA 1398 | 1398 | 6888 |
| siRNA 1405 | 1405 | 6895 |
| siRNA 1406 | 1406 | 6896 |
| siRNA 1408 | 1408 | 6898 |
| siRNA 1430 | 1430 | 6920 |
| siRNA 1441 | 1441 | 6931 |
| siRNA 1442 | 1442 | 6932 |
| siRNA 1445 | 1445 | 6935 |
| siRNA 1449 | 1449 | 6939 |
| siRNA 1452 | 1452 | 6942 |
| siRNA 1453 | 1453 | 6943 |
| siRNA 1459 | 1459 | 6949 |
| siRNA 1460 | 1460 | 6950 |
| siRNA 1462 | 1462 | 6952 |
| siRNA 1466 | 1466 | 6956 |
| siRNA 1469 | 1469 | 6959 |
| siRNA 1470 | 1470 | 6960 |
| siRNA 1474 | 1474 | 6964 |
| siRNA 1498 | 1498 | 6988 |
| siRNA 1505 | 1505 | 6995 |
| siRNA 1510 | 1510 | 7000 |
| siRNA 1529 | 1529 | 7019 |
| siRNA 1533 | 1533 | 7023 |
| siRNA 1568 | 1568 | 7058 |
| siRNA 1569 | 1569 | 7059 |
| siRNA 1570 | 1570 | 7060 |
| siRNA 1572 | 1572 | 7062 |
| siRNA 1575 | 1575 | 7065 |
| siRNA 1587 | 1587 | 7077 |
| siRNA 1589 | 1589 | 7079 |
| siRNA 1596 | 1596 | 7086 |
| siRNA 1621 | 1621 | 7111 |
| siRNA 1622 | 1622 | 7112 |
| siRNA 1623 | 1623 | 7113 |
| siRNA 1633 | 1633 | 7123 |
| siRNA 1634 | 1634 | 7124 |
| siRNA 1635 | 1635 | 7125 |
| siRNA 1638 | 1638 | 7128 |
| siRNA 1651 | 1651 | 7141 |
| siRNA 1652 | 1652 | 7142 |
| siRNA 1654 | 1654 | 7144 |
| siRNA 1656 | 1656 | 7146 |
| siRNA 1683 | 1683 | 7173 |
| siRNA 1684 | 1684 | 7174 |
| siRNA 1699 | 1699 | 7189 |
| siRNA 1706 | 1706 | 7196 |
| siRNA 1708 | 1708 | 7198 |
| siRNA 1712 | 1712 | 7202 |
| siRNA 1720 | 1720 | 7210 |
| siRNA 1806 | 1806 | 7296 |
| siRNA 1814 | 1814 | 7304 |
| siRNA 1825 | 1825 | 7315 |
| siRNA 1826 | 1826 | 7316 |
| siRNA 1832 | 1832 | 7322 |
| siRNA 1846 | 1846 | 7336 |
| siRNA 1851 | 1851 | 7341 |
| siRNA 1861 | 1861 | 7351 |
| siRNA 1865 | 1865 | 7355 |
| siRNA 1909 | 1909 | 7399 |
| siRNA 1912 | 1912 | 7402 |
| siRNA 1917 | 1917 | 7407 |
| siRNA 1918 | 1918 | 7408 |
| siRNA 1922 | 1922 | 7412 |
| siRNA 1926 | 1926 | 7416 |
| siRNA 1927 | 1927 | 7417 |
| siRNA 1928 | 1928 | 7418 |
| siRNA 1929 | 1929 | 7419 |
| siRNA 1936 | 1936 | 7426 |
| siRNA 1937 | 1937 | 7427 |
| siRNA 1938 | 1938 | 7428 |
| siRNA 1940 | 1940 | 7430 |
| siRNA 1951 | 1951 | 7441 |
| siRNA 1980 | 1980 | 7470 |
| siRNA 1981 | 1981 | 7471 |
| siRNA 1986 | 1986 | 7476 |
| siRNA 1991 | 1991 | 7481 |
| siRNA 1992 | 1992 | 7482 |
| siRNA 1995 | 1995 | 7485 |
| siRNA 2000 | 2000 | 7490 |
| siRNA 2014 | 2014 | 7504 |
| siRNA 2020 | 2020 | 7510 |
| siRNA 2049 | 2049 | 7539 |
| siRNA 2051 | 2051 | 7541 |
| siRNA 2057 | 2057 | 7547 |
| siRNA 2062 | 2062 | 7552 |
| siRNA 2077 | 2077 | 7567 |
| siRNA 2112 | 2112 | 7602 |
| siRNA 2116 | 2116 | 7606 |
| siRNA 2148 | 2148 | 7638 |
| siRNA 2149 | 2149 | 7639 |
| siRNA 2150 | 2150 | 7640 |
| siRNA 2151 | 2151 | 7641 |
| siRNA 2154 | 2154 | 7644 |
| siRNA 2157 | 2157 | 7647 |
| siRNA 2158 | 2158 | 7648 |
| siRNA 2167 | 2167 | 7657 |
| siRNA 2168 | 2168 | 7658 |
| siRNA 2170 | 2170 | 7660 |
| siRNA 2172 | 2172 | 7662 |
| siRNA 2193 | 2193 | 7683 |
| siRNA 2202 | 2202 | 7692 |
| siRNA 2213 | 2213 | 7703 |
| siRNA 2244 | 2244 | 7734 |
| siRNA 2251 | 2251 | 7741 |
| siRNA 2252 | 2252 | 7742 |
| siRNA 2257 | 2257 | 7747 |
| siRNA 2286 | 2286 | 7776 |
| siRNA 2306 | 2306 | 7796 |
| siRNA 2307 | 2307 | 7797 |
| siRNA 2312 | 2312 | 7802 |
| siRNA 2313 | 2313 | 7803 |
| siRNA 2314 | 2314 | 7804 |
| siRNA 2318 | 2318 | 7808 |
| siRNA 2324 | 2324 | 7814 |
| siRNA 2328 | 2328 | 7818 |
| siRNA 2329 | 2329 | 7819 |
| siRNA 2332 | 2332 | 7822 |
| siRNA 2336 | 2336 | 7826 |
| siRNA 2339 | 2339 | 7829 |
| siRNA 2340 | 2340 | 7830 |
| siRNA 2356 | 2356 | 7846 |
| siRNA 2357 | 2357 | 7847 |
| siRNA 2360 | 2360 | 7850 |
| siRNA 2362 | 2362 | 7852 |
| siRNA 2364 | 2364 | 7854 |
| siRNA 2365 | 2365 | 7855 |
| siRNA 2366 | 2366 | 7856 |
| siRNA 2370 | 2370 | 7860 |
| siRNA 2403 | 2403 | 7893 |
| siRNA 2417 | 2417 | 7907 |
| siRNA 2418 | 2418 | 7908 |
| siRNA 2436 | 2436 | 7926 |
| siRNA 2472 | 2472 | 7962 |
| siRNA 2477 | 2477 | 7967 |
| siRNA 2480 | 2480 | 7970 |
| siRNA 2486 | 2486 | 7976 |
| siRNA 2528 | 2528 | 8018 |
| siRNA 2530 | 2530 | 8020 |
| siRNA 2531 | 2531 | 8021 |
| siRNA 2532 | 2532 | 8022 |
| siRNA 2568 | 2568 | 8058 |
| siRNA 2598 | 2598 | 8088 |
| siRNA 2620 | 2620 | 8110 |
| siRNA 2623 | 2623 | 8113 |
| siRNA 2631 | 2631 | 8121 |
| siRNA 2632 | 2632 | 8122 |
| siRNA 2633 | 2633 | 8123 |
| siRNA 2645 | 2645 | 8135 |
| siRNA 2646 | 2646 | 8136 |
| siRNA 2673 | 2673 | 8163 |
| siRNA 2679 | 2679 | 8169 |
| siRNA 2759 | 2759 | 8249 |
| siRNA 2760 | 2760 | 8250 |
| siRNA 2762 | 2762 | 8252 |
| siRNA 2764 | 2764 | 8254 |
| siRNA 2767 | 2767 | 8257 |
| siRNA 2815 | 2815 | 8305 |
| siRNA 2821 | 2821 | 8311 |
| siRNA 2828 | 2828 | 8318 |
| siRNA 2829 | 2829 | 8319 |
| siRNA 2830 | 2830 | 8320 |
| siRNA 2836 | 2836 | 8326 |
| siRNA 2841 | 2841 | 8331 |
| siRNA 2842 | 2842 | 8332 |
| siRNA 2847 | 2847 | 8337 |
| siRNA 2866 | 2866 | 8356 |
| siRNA 2883 | 2883 | 8373 |
| siRNA 2890 | 2890 | 8380 |
| siRNA 2898 | 2898 | 8388 |
| siRNA 2908 | 2908 | 8398 |
| siRNA 2928 | 2928 | 8418 |
| siRNA 2938 | 2938 | 8428 |
| siRNA 2939 | 2939 | 8429 |
| siRNA 2982 | 2982 | 8472 |
| siRNA 2986 | 2986 | 8476 |
| siRNA 2987 | 2987 | 8477 |
| siRNA 2998 | 2998 | 8488 |
| siRNA 3024 | 3024 | 8514 |
| siRNA 3025 | 3025 | 8515 |
| siRNA 3035 | 3035 | 8525 |
| siRNA 3038 | 3038 | 8528 |
| siRNA 3042 | 3042 | 8532 |
| siRNA 3053 | 3053 | 8543 |
| siRNA 3093 | 3093 | 8583 |
| siRNA 3094 | 3094 | 8584 |
| siRNA 3146 | 3146 | 8636 |
| siRNA 3164 | 3164 | 8654 |
| siRNA 3222 | 3222 | 8712 |
| siRNA 3231 | 3231 | 8721 |
| siRNA 3232 | 3232 | 8722 |
| siRNA 3238 | 3238 | 8728 |
| siRNA 3247 | 3247 | 8737 |
| siRNA 3259 | 3259 | 8749 |
| siRNA 3310 | 3310 | 8800 |
| siRNA 3333 | 3333 | 8823 |
| siRNA 3335 | 3335 | 8825 |
| siRNA 3339 | 3339 | 8829 |
| siRNA 3342 | 3342 | 8832 |
| siRNA 3350 | 3350 | 8840 |
| siRNA 3351 | 3351 | 8841 |
| siRNA 3352 | 3352 | 8842 |
| siRNA 3353 | 3353 | 8843 |
| siRNA 3357 | 3357 | 8847 |
| siRNA 3358 | 3358 | 8848 |
| siRNA 3364 | 3364 | 8854 |
| siRNA 3396 | 3396 | 8886 |
| siRNA 3405 | 3405 | 8895 |
| siRNA 3411 | 3411 | 8901 |
| siRNA 3412 | 3412 | 8902 |
| siRNA 3413 | 3413 | 8903 |
| siRNA 3417 | 3417 | 8907 |
| siRNA 3425 | 3425 | 8915 |
| siRNA 3436 | 3436 | 8926 |
| siRNA 3437 | 3437 | 8927 |
| siRNA 3444 | 3444 | 8934 |
| siRNA 3449 | 3449 | 8939 |
| siRNA 3450 | 3450 | 8940 |
| siRNA 3460 | 3460 | 8950 |
| siRNA 3461 | 3461 | 8951 |
| siRNA 3472 | 3472 | 8962 |
| siRNA 3487 | 3487 | 8977 |
| siRNA 3489 | 3489 | 8979 |
| siRNA 3490 | 3490 | 8980 |
| siRNA 3491 | 3491 | 8981 |
| siRNA 3500 | 3500 | 8990 |
| siRNA 3502 | 3502 | 8992 |
| siRNA 3540 | 3540 | 9030 |
| siRNA 3549 | 3549 | 9039 |
| siRNA 3560 | 3560 | 9050 |
| siRNA 3561 | 3561 | 9051 |
| siRNA 3564 | 3564 | 9054 |
| siRNA 3566 | 3566 | 9056 |
| siRNA 3586 | 3586 | 9076 |
| siRNA 3587 | 3587 | 9077 |
| siRNA 3602 | 3602 | 9092 |
| siRNA 3605 | 3605 | 9095 |
| siRNA 3639 | 3639 | 9129 |
| siRNA 3641 | 3641 | 9131 |
| siRNA 3677 | 3677 | 9167 |
| siRNA 3691 | 3691 | 9181 |
| siRNA 3703 | 3703 | 9193 |
| siRNA 3712 | 3712 | 9202 |
| siRNA 3746 | 3746 | 9236 |
| siRNA 3747 | 3747 | 9237 |
| siRNA 3748 | 3748 | 9238 |
| siRNA 3756 | 3756 | 9246 |
| siRNA 3792 | 3792 | 9282 |
| siRNA 3803 | 3803 | 9293 |
| siRNA 3810 | 3810 | 9300 |
| siRNA 3838 | 3838 | 9328 |
| siRNA 3869 | 3869 | 9359 |
| siRNA 3883 | 3883 | 9373 |
| siRNA 3922 | 3922 | 9412 |
| siRNA 3934 | 3934 | 9424 |
| siRNA 3943 | 3943 | 9433 |
| siRNA 3945 | 3945 | 9435 |
| siRNA 3970 | 3970 | 9460 |
| siRNA 3988 | 3988 | 9478 |
| siRNA 4040 | 4040 | 9530 |
| siRNA 4050 | 4050 | 9540 |
| siRNA 4051 | 4051 | 9541 |
| siRNA 4052 | 4052 | 9542 |
| siRNA 4053 | 4053 | 9543 |
| siRNA 4054 | 4054 | 9544 |
| siRNA 4058 | 4058 | 9548 |
| siRNA 4070 | 4070 | 9560 |
| siRNA 4112 | 4112 | 9602 |
| siRNA 4209 | 4209 | 9699 |
| siRNA 4210 | 4210 | 9700 |
| siRNA 4211 | 4211 | 9701 |
| siRNA 4214 | 4214 | 9704 |
| siRNA 4223 | 4223 | 9713 |
| siRNA 4224 | 4224 | 9714 |
| siRNA 4226 | 4226 | 9716 |
| siRNA 4235 | 4235 | 9725 |
| siRNA 4237 | 4237 | 9727 |
| siRNA 4238 | 4238 | 9728 |
| siRNA 4242 | 4242 | 9732 |
| siRNA 4245 | 4245 | 9735 |
| siRNA 4282 | 4282 | 9772 |
| siRNA 4290 | 4290 | 9780 |
| siRNA 4293 | 4293 | 9783 |
| siRNA 4294 | 4294 | 9784 |
| siRNA 4295 | 4295 | 9785 |
| siRNA 4296 | 4296 | 9786 |
| siRNA 4356 | 4356 | 9846 |
| siRNA 4368 | 4368 | 9858 |
| siRNA 4382 | 4382 | 9872 |
| siRNA 4388 | 4388 | 9878 |
| siRNA 4455 | 4455 | 9945 |
| siRNA 4460 | 4460 | 9950 |
| siRNA 4474 | 4474 | 9964 |
| siRNA 4475 | 4475 | 9965 |
| siRNA 4481 | 4481 | 9971 |
| siRNA 4482 | 4482 | 9972 |
| siRNA 4487 | 4487 | 9977 |
| siRNA 4488 | 4488 | 9978 |
| siRNA 4491 | 4491 | 9981 |
| siRNA 4521 | 4521 | 10011 |
| siRNA 4545 | 4545 | 10035 |
| siRNA 4547 | 4547 | 10037 |
| siRNA 4594 | 4594 | 10084 |
| siRNA 4595 | 4595 | 10085 |
| siRNA 4598 | 4598 | 10088 |
| siRNA 4629 | 4629 | 10119 |
| siRNA 4644 | 4644 | 10134 |
| siRNA 4705 | 4705 | 10195 |
| siRNA 4726 | 4726 | 10216 |
| siRNA 4739 | 4739 | 10229 |
| siRNA 4767 | 4767 | 10257 |
| siRNA 4800 | 4800 | 10290 |
| siRNA 4807 | 4807 | 10297 |
| siRNA 4852 | 4852 | 10342 |
| siRNA 4902 | 4902 | 10392 |
| siRNA 4903 | 4903 | 10393 |
| siRNA 4906 | 4906 | 10396 |
| siRNA 4910 | 4910 | 10400 |
| siRNA 4943 | 4943 | 10433 |
| siRNA 4975 | 4975 | 10465 |
| siRNA 4977 | 4977 | 10467 |
| siRNA 4981 | 4981 | 10471 |
| siRNA 4982 | 4982 | 10472 |
| siRNA 4983 | 4983 | 10473 |
| siRNA 4984 | 4984 | 10474 |
| siRNA 4989 | 4989 | 10479 |
| siRNA 4990 | 4990 | 10480 |
| siRNA 4993 | 4993 | 10483 |
| siRNA 4996 | 4996 | 10486 |
| siRNA 5000 | 5000 | 10490 |
| siRNA 5004 | 5004 | 10494 |
| siRNA 5017 | 5017 | 10507 |
| siRNA 5020 | 5020 | 10510 |
| siRNA 5027 | 5027 | 10517 |
| siRNA 5071 | 5071 | 10561 |
| siRNA 5072 | 5072 | 10562 |
| siRNA 5073 | 5073 | 10563 |
| siRNA 5100 | 5100 | 10590 |
| siRNA 5103 | 5103 | 10593 |
| siRNA 5118 | 5118 | 10608 |
| siRNA 5119 | 5119 | 10609 |
| siRNA 5120 | 5120 | 10610 |
| siRNA 5158 | 5158 | 10648 |
| siRNA 5164 | 5164 | 10654 |
| siRNA 5191 | 5191 | 10681 |
| siRNA 5194 | 5194 | 10684 |
| siRNA 5206 | 5206 | 10696 |
| siRNA 5207 | 5207 | 10697 |
| siRNA 5208 | 5208 | 10698 |
| siRNA 5210 | 5210 | 10700 |
| siRNA 5211 | 5211 | 10701 |
| siRNA 5214 | 5214 | 10704 |
| siRNA 5217 | 5217 | 10707 |
| siRNA 5280 | 5280 | 10770 |
| siRNA 5297 | 5297 | 10787 |
| siRNA 5334 | 5334 | 10824 |
| siRNA 5335 | 5335 | 10825 |
| siRNA 5340 | 5340 | 10830 |
| siRNA 5341 | 5341 | 10831 |
| siRNA 5343 | 5343 | 10833 |
| siRNA 5346 | 5346 | 10836 |
| siRNA 5349 | 5349 | 10839 |
| siRNA 5352 | 5352 | 10842 |
| siRNA 5374 | 5374 | 10864 |
| siRNA 5375 | 5375 | 10865 |
| siRNA 5392 | 5392 | 10882 |
| siRNA 5404 | 5404 | 10894 |
| siRNA 5408 | 5408 | 10898 |
| siRNA 5409 | 5409 | 10899 |
| siRNA 5443 | 5443 | 10933 |
| siRNA 5455 | 5455 | 10945 |
| siRNA 5478 | 5478 | 10968 |
| siRNA 5485 | 5485 | 10975 |

[0441] The siRNA sequences in subset D were also selected to have an off-target frequency of ≤20 human off-targets matched with 2 mismatches by antisense strand to yield subset E. Subset E includes 489 siRNAs whose base sequences are shown in Table 19.

TABLE 19
Subset E

| | Sense | Antisense |
|---|---|---|
| siRNA Name | SEQ ID NO: | SEQ ID NO: |
| siRNA 72 | 72 | 5562 |
| siRNA 106 | 106 | 5596 |
| siRNA 164 | 164 | 5654 |
| siRNA 224 | 224 | 5714 |
| siRNA 236 | 236 | 5726 |
| siRNA 266 | 266 | 5756 |
| siRNA 281 | 281 | 5771 |
| siRNA 282 | 282 | 5772 |
| siRNA 305 | 305 | 5795 |
| siRNA 313 | 313 | 5803 |
| siRNA 317 | 317 | 5807 |
| siRNA 336 | 336 | 5826 |
| siRNA 338 | 338 | 5828 |
| siRNA 342 | 342 | 5832 |
| siRNA 356 | 356 | 5846 |
| siRNA 381 | 381 | 5871 |
| siRNA 394 | 394 | 5884 |
| siRNA 403 | 403 | 5893 |
| siRNA 415 | 415 | 5905 |
| siRNA 457 | 457 | 5947 |
| siRNA 463 | 463 | 5953 |
| siRNA 482 | 482 | 5972 |
| siRNA 509 | 509 | 5999 |
| siRNA 510 | 510 | 6000 |
| siRNA 514 | 514 | 6004 |
| siRNA 526 | 526 | 6016 |
| siRNA 528 | 528 | 6018 |
| siRNA 538 | 538 | 6028 |
| siRNA 541 | 541 | 6031 |
| siRNA 546 | 546 | 6036 |
| siRNA 562 | 562 | 6052 |
| siRNA 570 | 570 | 6060 |
| siRNA 573 | 573 | 6063 |
| siRNA 574 | 574 | 6064 |
| siRNA 575 | 575 | 6065 |
| siRNA 587 | 587 | 6077 |
| siRNA 589 | 589 | 6079 |
| siRNA 617 | 617 | 6107 |
| siRNA 633 | 633 | 6123 |
| siRNA 639 | 639 | 6129 |
| siRNA 643 | 643 | 6133 |
| siRNA 644 | 644 | 6134 |
| siRNA 647 | 647 | 6137 |
| siRNA 650 | 650 | 6140 |
| siRNA 651 | 651 | 6141 |
| siRNA 664 | 664 | 6154 |
| siRNA 671 | 671 | 6161 |
| siRNA 679 | 679 | 6169 |
| siRNA 680 | 680 | 6170 |
| siRNA 682 | 682 | 6172 |
| siRNA 685 | 685 | 6175 |
| siRNA 689 | 689 | 6179 |
| siRNA 690 | 690 | 6180 |
| siRNA 691 | 691 | 6181 |
| siRNA 692 | 692 | 6182 |
| siRNA 719 | 719 | 6209 |
| siRNA 736 | 736 | 6226 |
| siRNA 738 | 738 | 6228 |
| siRNA 739 | 739 | 6229 |
| siRNA 740 | 740 | 6230 |
| siRNA 743 | 743 | 6233 |
| siRNA 749 | 749 | 6239 |
| siRNA 750 | 750 | 6240 |
| siRNA 766 | 766 | 6256 |
| siRNA 783 | 783 | 6273 |
| siRNA 785 | 785 | 6275 |
| siRNA 786 | 786 | 6276 |
| siRNA 787 | 787 | 6277 |
| siRNA 788 | 788 | 6278 |
| siRNA 792 | 792 | 6282 |
| siRNA 796 | 796 | 6286 |
| siRNA 797 | 797 | 6287 |
| siRNA 813 | 813 | 6303 |
| siRNA 818 | 818 | 6308 |
| siRNA 819 | 819 | 6309 |
| siRNA 854 | 854 | 6344 |
| siRNA 877 | 877 | 6367 |
| siRNA 887 | 887 | 6377 |
| siRNA 888 | 888 | 6378 |
| siRNA 922 | 922 | 6412 |
| siRNA 930 | 930 | 6420 |
| siRNA 933 | 933 | 6423 |
| siRNA 934 | 934 | 6424 |
| siRNA 941 | 941 | 6431 |
| siRNA 942 | 942 | 6432 |
| siRNA 953 | 953 | 6443 |
| siRNA 954 | 954 | 6444 |
| siRNA 961 | 961 | 6451 |
| siRNA 967 | 967 | 6457 |
| siRNA 973 | 973 | 6463 |
| siRNA 999 | 999 | 6489 |
| siRNA 1000 | 1000 | 6490 |
| siRNA 1001 | 1001 | 6491 |
| siRNA 1007 | 1007 | 6497 |
| siRNA 1040 | 1040 | 6530 |
| siRNA 1053 | 1053 | 6543 |
| siRNA 1075 | 1075 | 6565 |
| siRNA 1084 | 1084 | 6574 |
| siRNA 1086 | 1086 | 6576 |
| siRNA 1087 | 1087 | 6577 |
| siRNA 1153 | 1153 | 6643 |
| siRNA 1156 | 1156 | 6646 |
| siRNA 1157 | 1157 | 6647 |
| siRNA 1159 | 1159 | 6649 |
| siRNA 1175 | 1175 | 6665 |
| siRNA 1196 | 1196 | 6686 |
| siRNA 1224 | 1224 | 6714 |
| siRNA 1255 | 1255 | 6745 |
| siRNA 1279 | 1279 | 6769 |
| siRNA 1280 | 1280 | 6770 |
| siRNA 1294 | 1294 | 6784 |
| siRNA 1296 | 1296 | 6786 |
| siRNA 1303 | 1303 | 6793 |
| siRNA 1343 | 1343 | 6833 |
| siRNA 1346 | 1346 | 6836 |
| siRNA 1347 | 1347 | 6837 |
| siRNA 1363 | 1363 | 6853 |
| siRNA 1398 | 1398 | 6888 |
| siRNA 1405 | 1405 | 6895 |
| siRNA 1406 | 1406 | 6896 |
| siRNA 1408 | 1408 | 6898 |
| siRNA 1430 | 1430 | 6920 |
| siRNA 1441 | 1441 | 6931 |
| siRNA 1442 | 1442 | 6932 |
| siRNA 1445 | 1445 | 6935 |
| siRNA 1449 | 1449 | 6939 |
| siRNA 1452 | 1452 | 6942 |
| siRNA 1453 | 1453 | 6943 |
| siRNA 1459 | 1459 | 6949 |
| siRNA 1460 | 1460 | 6950 |
| siRNA 1462 | 1462 | 6952 |
| siRNA 1466 | 1466 | 6956 |
| siRNA 1469 | 1469 | 6959 |
| siRNA 1470 | 1470 | 6960 |
| siRNA 1474 | 1474 | 6964 |
| siRNA 1498 | 1498 | 6988 |
| siRNA 1505 | 1505 | 6995 |
| siRNA 1510 | 1510 | 7000 |
| siRNA 1529 | 1529 | 7019 |
| siRNA 1533 | 1533 | 7023 |
| siRNA 1568 | 1568 | 7058 |
| siRNA 1569 | 1569 | 7059 |
| siRNA 1570 | 1570 | 7060 |
| siRNA 1572 | 1572 | 7062 |
| siRNA 1575 | 1575 | 7065 |
| siRNA 1587 | 1587 | 7077 |
| siRNA 1589 | 1589 | 7079 |
| siRNA 1596 | 1596 | 7086 |
| siRNA 1621 | 1621 | 7111 |
| siRNA 1622 | 1622 | 7112 |
| siRNA 1623 | 1623 | 7113 |
| siRNA 1633 | 1633 | 7123 |
| siRNA 1634 | 1634 | 7124 |
| siRNA 1635 | 1635 | 7125 |
| siRNA 1638 | 1638 | 7128 |
| siRNA 1651 | 1651 | 7141 |
| siRNA 1652 | 1652 | 7142 |
| siRNA 1654 | 1654 | 7144 |
| siRNA 1656 | 1656 | 7146 |
| siRNA 1683 | 1683 | 7173 |
| siRNA 1684 | 1684 | 7174 |
| siRNA 1699 | 1699 | 7189 |
| siRNA 1706 | 1706 | 7196 |
| siRNA 1708 | 1708 | 7198 |
| siRNA 1712 | 1712 | 7202 |
| siRNA 1720 | 1720 | 7210 |
| siRNA 1806 | 1806 | 7296 |
| siRNA 1814 | 1814 | 7304 |
| siRNA 1825 | 1825 | 7315 |
| siRNA 1826 | 1826 | 7316 |
| siRNA 1832 | 1832 | 7322 |
| siRNA 1846 | 1846 | 7336 |
| siRNA 1851 | 1851 | 7341 |
| siRNA 1861 | 1861 | 7351 |
| siRNA 1865 | 1865 | 7355 |
| siRNA 1909 | 1909 | 7399 |
| siRNA 1912 | 1912 | 7402 |
| siRNA 1917 | 1917 | 7407 |
| siRNA 1918 | 1918 | 7408 |
| siRNA 1922 | 1922 | 7412 |
| siRNA 1926 | 1926 | 7416 |
| siRNA 1927 | 1927 | 7417 |
| siRNA 1928 | 1928 | 7418 |
| siRNA 1929 | 1929 | 7419 |
| siRNA 1936 | 1936 | 7426 |
| siRNA 1937 | 1937 | 7427 |
| siRNA 1938 | 1938 | 7428 |
| siRNA 1940 | 1940 | 7430 |
| siRNA 1951 | 1951 | 7441 |
| siRNA 1980 | 1980 | 7470 |
| siRNA 1981 | 1981 | 7471 |
| siRNA 1986 | 1986 | 7476 |
| siRNA 1991 | 1991 | 7481 |
| siRNA 1992 | 1992 | 7482 |
| siRNA 1995 | 1995 | 7485 |
| siRNA 2000 | 2000 | 7490 |
| siRNA 2014 | 2014 | 7504 |
| siRNA 2020 | 2020 | 7510 |
| siRNA 2049 | 2049 | 7539 |
| siRNA 2051 | 2051 | 7541 |
| siRNA 2057 | 2057 | 7547 |
| siRNA 2062 | 2062 | 7552 |
| siRNA 2077 | 2077 | 7567 |
| siRNA 2112 | 2112 | 7602 |
| siRNA 2116 | 2116 | 7606 |
| siRNA 2148 | 2148 | 7638 |
| siRNA 2149 | 2149 | 7639 |
| siRNA 2150 | 2150 | 7640 |
| siRNA 2151 | 2151 | 7641 |
| siRNA 2154 | 2154 | 7644 |
| siRNA 2157 | 2157 | 7647 |
| siRNA 2158 | 2158 | 7648 |
| siRNA 2167 | 2167 | 7657 |
| siRNA 2168 | 2168 | 7658 |
| siRNA 2170 | 2170 | 7660 |
| siRNA 2172 | 2172 | 7662 |
| siRNA 2193 | 2193 | 7683 |
| siRNA 2202 | 2202 | 7692 |
| siRNA 2213 | 2213 | 7703 |
| siRNA 2244 | 2244 | 7734 |
| siRNA 2251 | 2251 | 7741 |
| siRNA 2252 | 2252 | 7742 |
| siRNA 2257 | 2257 | 7747 |
| siRNA 2286 | 2286 | 7776 |
| siRNA 2306 | 2306 | 7796 |
| siRNA 2307 | 2307 | 7797 |
| siRNA 2312 | 2312 | 7802 |
| siRNA 2313 | 2313 | 7803 |
| siRNA 2314 | 2314 | 7804 |
| siRNA 2318 | 2318 | 7808 |
| siRNA 2324 | 2324 | 7814 |
| siRNA 2328 | 2328 | 7818 |
| siRNA 2329 | 2329 | 7819 |
| siRNA 2332 | 2332 | 7822 |
| siRNA 2336 | 2336 | 7826 |
| siRNA 2339 | 2339 | 7829 |
| siRNA 2340 | 2340 | 7830 |
| siRNA 2356 | 2356 | 7846 |
| siRNA 2357 | 2357 | 7847 |
| siRNA 2360 | 2360 | 7850 |
| siRNA 2362 | 2362 | 7852 |
| siRNA 2364 | 2364 | 7854 |
| siRNA 2365 | 2365 | 7855 |
| siRNA 2366 | 2366 | 7856 |
| siRNA 2370 | 2370 | 7860 |
| siRNA 2403 | 2403 | 7893 |
| siRNA 2417 | 2417 | 7907 |
| siRNA 2418 | 2418 | 7908 |
| siRNA 2436 | 2436 | 7926 |
| siRNA 2472 | 2472 | 7962 |
| siRNA 2477 | 2477 | 7967 |
| siRNA 2480 | 2480 | 7970 |
| siRNA 2486 | 2486 | 7976 |
| siRNA 2528 | 2528 | 8018 |
| siRNA 2530 | 2530 | 8020 |
| siRNA 2531 | 2531 | 8021 |
| siRNA 2532 | 2532 | 8022 |
| siRNA 2568 | 2568 | 8058 |
| siRNA 2598 | 2598 | 8088 |
| siRNA 2620 | 2620 | 8110 |
| siRNA 2623 | 2623 | 8113 |
| siRNA 2631 | 2631 | 8121 |
| siRNA 2632 | 2632 | 8122 |
| siRNA 2633 | 2633 | 8123 |
| siRNA 2645 | 2645 | 8135 |
| siRNA 2646 | 2646 | 8136 |
| siRNA 2673 | 2673 | 8163 |
| siRNA 2679 | 2679 | 8169 |
| siRNA 2759 | 2759 | 8249 |
| siRNA 2760 | 2760 | 8250 |
| siRNA 2762 | 2762 | 8252 |
| siRNA 2764 | 2764 | 8254 |
| siRNA 2767 | 2767 | 8257 |
| siRNA 2815 | 2815 | 8305 |
| siRNA 2821 | 2821 | 8311 |
| siRNA 2828 | 2828 | 8318 |
| siRNA 2829 | 2829 | 8319 |
| siRNA 2830 | 2830 | 8320 |
| siRNA 2836 | 2836 | 8326 |
| siRNA 2841 | 2841 | 8331 |
| siRNA 2842 | 2842 | 8332 |
| siRNA 2847 | 2847 | 8337 |
| siRNA 2866 | 2866 | 8356 |
| siRNA 2883 | 2883 | 8373 |
| siRNA 2890 | 2890 | 8380 |
| siRNA 2898 | 2898 | 8388 |
| siRNA 2908 | 2908 | 8398 |
| siRNA 2928 | 2928 | 8418 |
| siRNA 2938 | 2938 | 8428 |
| siRNA 2939 | 2939 | 8429 |
| siRNA 2982 | 2982 | 8472 |
| siRNA 2986 | 2986 | 8476 |
| siRNA 2987 | 2987 | 8477 |
| siRNA 2998 | 2998 | 8488 |
| siRNA 3024 | 3024 | 8514 |
| siRNA 3025 | 3025 | 8515 |
| siRNA 3035 | 3035 | 8525 |
| siRNA 3038 | 3038 | 8528 |
| siRNA 3042 | 3042 | 8532 |
| siRNA 3053 | 3053 | 8543 |
| siRNA 3093 | 3093 | 8583 |
| siRNA 3094 | 3094 | 8584 |
| siRNA 3146 | 3146 | 8636 |
| siRNA 3164 | 3164 | 8654 |
| siRNA 3222 | 3222 | 8712 |
| siRNA 3231 | 3231 | 8721 |
| siRNA 3232 | 3232 | 8722 |
| siRNA 3238 | 3238 | 8728 |
| siRNA 3247 | 3247 | 8737 |
| siRNA 3259 | 3259 | 8749 |
| siRNA 3310 | 3310 | 8800 |
| siRNA 3333 | 3333 | 8823 |
| siRNA 3335 | 3335 | 8825 |
| siRNA 3339 | 3339 | 8829 |
| siRNA 3342 | 3342 | 8832 |
| siRNA 3350 | 3350 | 8840 |
| siRNA 3351 | 3351 | 8841 |
| siRNA 3352 | 3352 | 8842 |
| siRNA 3353 | 3353 | 8843 |
| siRNA 3357 | 3357 | 8847 |
| siRNA 3358 | 3358 | 8848 |
| siRNA 3364 | 3364 | 8854 |
| siRNA 3396 | 3396 | 8886 |
| siRNA 3405 | 3405 | 8895 |
| siRNA 3411 | 3411 | 8901 |
| siRNA 3412 | 3412 | 8902 |
| siRNA 3413 | 3413 | 8903 |
| siRNA 3417 | 3417 | 8907 |
| siRNA 3425 | 3425 | 8915 |
| siRNA 3436 | 3436 | 8926 |
| siRNA 3437 | 3437 | 8927 |
| siRNA 3444 | 3444 | 8934 |
| siRNA 3449 | 3449 | 8939 |
| siRNA 3450 | 3450 | 8940 |
| siRNA 3460 | 3460 | 8950 |
| siRNA 3461 | 3461 | 8951 |
| siRNA 3472 | 3472 | 8962 |
| siRNA 3487 | 3487 | 8977 |
| siRNA 3489 | 3489 | 8979 |
| siRNA 3490 | 3490 | 8980 |
| siRNA 3491 | 3491 | 8981 |
| siRNA 3500 | 3500 | 8990 |
| siRNA 3502 | 3502 | 8992 |
| siRNA 3540 | 3540 | 9030 |
| siRNA 3549 | 3549 | 9039 |
| siRNA 3560 | 3560 | 9050 |
| siRNA 3561 | 3561 | 9051 |
| siRNA 3564 | 3564 | 9054 |
| siRNA 3566 | 3566 | 9056 |
| siRNA 3586 | 3586 | 9076 |
| siRNA 3587 | 3587 | 9077 |
| siRNA 3602 | 3602 | 9092 |
| siRNA 3605 | 3605 | 9095 |
| siRNA 3639 | 3639 | 9129 |
| siRNA 3641 | 3641 | 9131 |
| siRNA 3677 | 3677 | 9167 |
| siRNA 3691 | 3691 | 9181 |
| siRNA 3703 | 3703 | 9193 |
| siRNA 3712 | 3712 | 9202 |
| siRNA 3746 | 3746 | 9236 |
| siRNA 3747 | 3747 | 9237 |
| siRNA 3748 | 3748 | 9238 |
| siRNA 3756 | 3756 | 9246 |
| siRNA 3792 | 3792 | 9282 |
| siRNA 3803 | 3803 | 9293 |
| siRNA 3810 | 3810 | 9300 |
| siRNA 3838 | 3838 | 9328 |
| siRNA 3869 | 3869 | 9359 |
| siRNA 3883 | 3883 | 9373 |
| siRNA 3922 | 3922 | 9412 |
| siRNA 3934 | 3934 | 9424 |
| siRNA 3943 | 3943 | 9433 |
| siRNA 3945 | 3945 | 9435 |
| siRNA 3970 | 3970 | 9460 |
| siRNA 3988 | 3988 | 9478 |
| siRNA 4040 | 4040 | 9530 |
| siRNA 4050 | 4050 | 9540 |
| siRNA 4051 | 4051 | 9541 |
| siRNA 4052 | 4052 | 9542 |
| siRNA 4053 | 4053 | 9543 |
| siRNA 4054 | 4054 | 9544 |
| siRNA 4058 | 4058 | 9548 |
| siRNA 4070 | 4070 | 9560 |
| siRNA 4112 | 4112 | 9602 |
| siRNA 4209 | 4209 | 9699 |
| siRNA 4210 | 4210 | 9700 |
| siRNA 4211 | 4211 | 9701 |
| siRNA 4214 | 4214 | 9704 |
| siRNA 4223 | 4223 | 9713 |
| siRNA 4224 | 4224 | 9714 |
| siRNA 4226 | 4226 | 9716 |
| siRNA 4235 | 4235 | 9725 |
| siRNA 4237 | 4237 | 9727 |
| siRNA 4238 | 4238 | 9728 |
| siRNA 4242 | 4242 | 9732 |
| siRNA 4245 | 4245 | 9735 |
| siRNA 4282 | 4282 | 9772 |
| siRNA 4290 | 4290 | 9780 |
| siRNA 4293 | 4293 | 9783 |
| siRNA 4294 | 4294 | 9784 |
| siRNA 4295 | 4295 | 9785 |
| siRNA 4296 | 4296 | 9786 |
| siRNA 4356 | 4356 | 9846 |
| siRNA 4368 | 4368 | 9858 |
| siRNA 4382 | 4382 | 9872 |
| siRNA 4388 | 4388 | 9878 |
| siRNA 4455 | 4455 | 9945 |
| siRNA 4460 | 4460 | 9950 |
| siRNA 4474 | 4474 | 9964 |
| siRNA 4475 | 4475 | 9965 |
| siRNA 4481 | 4481 | 9971 |
| siRNA 4482 | 4482 | 9972 |
| siRNA 4487 | 4487 | 9977 |
| siRNA 4488 | 4488 | 9978 |
| siRNA 4491 | 4491 | 9981 |
| siRNA 4521 | 4521 | 10011 |
| siRNA 4545 | 4545 | 10035 |
| siRNA 4547 | 4547 | 10037 |
| siRNA 4594 | 4594 | 10084 |
| siRNA 4595 | 4595 | 10085 |
| siRNA 4598 | 4598 | 10088 |
| siRNA 4629 | 4629 | 10119 |
| siRNA 4644 | 4644 | 10134 |
| siRNA 4705 | 4705 | 10195 |
| siRNA 4726 | 4726 | 10216 |
| siRNA 4739 | 4739 | 10229 |
| siRNA 4767 | 4767 | 10257 |
| siRNA 4800 | 4800 | 10290 |
| siRNA 4807 | 4807 | 10297 |
| siRNA 4852 | 4852 | 10342 |
| siRNA 4902 | 4902 | 10392 |
| siRNA 4903 | 4903 | 10393 |
| siRNA 4906 | 4906 | 10396 |
| siRNA 4910 | 4910 | 10400 |
| siRNA 4943 | 4943 | 10433 |
| siRNA 4975 | 4975 | 10465 |
| siRNA 4977 | 4977 | 10467 |
| siRNA 4981 | 4981 | 10471 |
| siRNA 4982 | 4982 | 10472 |
| siRNA 4983 | 4983 | 10473 |
| siRNA 4984 | 4984 | 10474 |
| siRNA 4989 | 4989 | 10479 |
| siRNA 4990 | 4990 | 10480 |
| siRNA 4993 | 4993 | 10483 |
| siRNA 4996 | 4996 | 10486 |
| siRNA 5000 | 5000 | 10490 |
| siRNA 5004 | 5004 | 10494 |
| siRNA 5017 | 5017 | 10507 |
| siRNA 5020 | 5020 | 10510 |
| siRNA 5027 | 5027 | 10517 |
| siRNA 5071 | 5071 | 10561 |
| siRNA 5072 | 5072 | 10562 |
| siRNA 5073 | 5073 | 10563 |
| siRNA 5100 | 5100 | 10590 |
| siRNA 5103 | 5103 | 10593 |
| siRNA 5118 | 5118 | 10608 |
| siRNA 5119 | 5119 | 10609 |
| siRNA 5120 | 5120 | 10610 |
| siRNA 5158 | 5158 | 10648 |
| siRNA 5164 | 5164 | 10654 |
| siRNA 5191 | 5191 | 10681 |
| siRNA 5194 | 5194 | 10684 |
| siRNA 5206 | 5206 | 10696 |
| siRNA 5207 | 5207 | 10697 |
| siRNA 5208 | 5208 | 10698 |
| siRNA 5210 | 5210 | 10700 |
| siRNA 5211 | 5211 | 10701 |
| siRNA 5214 | 5214 | 10704 |
| siRNA 5217 | 5217 | 10707 |
| siRNA 5280 | 5280 | 10770 |
| siRNA 5297 | 5297 | 10787 |
| siRNA 5334 | 5334 | 10824 |
| siRNA 5335 | 5335 | 10825 |
| siRNA 5340 | 5340 | 10830 |
| siRNA 5341 | 5341 | 10831 |
| siRNA 5343 | 5343 | 10833 |
| siRNA 5346 | 5346 | 10836 |
| siRNA 5349 | 5349 | 10839 |
| siRNA 5352 | 5352 | 10842 |
| siRNA 5374 | 5374 | 10864 |
| siRNA 5375 | 5375 | 10865 |
| siRNA 5392 | 5392 | 10882 |
| siRNA 5404 | 5404 | 10894 |
| siRNA 5408 | 5408 | 10898 |
| siRNA 5409 | 5409 | 10899 |
| siRNA 5443 | 5443 | 10933 |
| siRNA 5455 | 5455 | 10945 |
| siRNA 5478 | 5478 | 10968 |
| siRNA 5485 | 5485 | 10975 |

[0442] Therapeutic siRNAs were designed to target human SOS2 as described above and, in some cases, the SOS2 sequences of two toxicology-relevant species, in this case, the non-human primate (NHP) cynomolgus monkey and the mouse. The siRNAs included in subset F had the following characteristics: Cross-reactivity with 19mer in human SOS2 mRNA, with 17mer/19mer in cynomolgus monkey SOS2, and with 17mer/19mer in mouse SOS2; Specificity: Subset A siRNAs for human, specificity category AS2 or better and SS3 or better for cynomolgus monkey, and specificity category AS2 or better and SS3 or better for mouse.

[0443] Subset F includes 20 siRNAs whose base sequences are shown in Table 20.

TABLE 20
Subset F

| | Sense | Antisense |
|---|---|---|
| siRNA Name | SEQ ID NO: | SEQ ID NO: |
| siRNA 743 | 743 | 6233 |
| siRNA 744 | 744 | 6234 |
| siRNA 1036 | 1036 | 6526 |
| siRNA 1056 | 1056 | 6546 |
| siRNA 1178 | 1178 | 6668 |
| siRNA 1521 | 1521 | 7011 |
| siRNA 2148 | 2148 | 7638 |
| siRNA 2151 | 2151 | 7641 |
| siRNA 2152 | 2152 | 7642 |
| siRNA 2158 | 2158 | 7648 |
| siRNA 2619 | 2619 | 8109 |
| siRNA 2882 | 2882 | 8372 |
| siRNA 2883 | 2883 | 8373 |
| siRNA 2884 | 2884 | 8374 |
| siRNA 3042 | 3042 | 8532 |
| siRNA 3305 | 3305 | 8795 |
| siRNA 3969 | 3969 | 9459 |
| siRNA 4216 | 4216 | 9706 |
| siRNA 4305 | 4305 | 9795 |
| siRNA 4309 | 4309 | 9799 |

[0444] In some cases, the sense strand of any of the siRNAs of subset F comprises siRNA with a particular modification pattern. In this modification pattern, position 9 counting from the 5′ end of the of the sense strand is has the 2′F modification. If position 9 of the sense strand is a pyrimidine, then all purines in the sense strand have the 2′OMe modification. If position 9 is the only pyrimidine between positions 5 and 11 of the sense stand, then position 9 is the only position with the 2′F modification in the sense strand. If position 9 and only one other base between positions 5 and 11 of the sense strand are pyrimidines, then both of these pyrimidines are the only two positions with the 2′F modification in the sense strand. If position 9 and only two other bases between positions 5 and 11 of the sense strand are pyrimidines, and those two other pyrimidines are in adjacent positions so that there would be not three 2′F modifications in a row, then any combination of 2′F modifications can be made that give three 2′F modifications in total. If there are >2 pyrimidines between positions 5 and 11 of the sense strand, then all combinations of pyrimidines having the 2′F modification are allowed that have three to five 2′F modifications in total, provided that the sense strand does not have three 2′F modifications in a row.

[0445] If position 9 of the sense strand is a purine, then all purines in the sense strand have the 2′OMe modification. If position 9 is the only purine between positions 5 and 11 of the sense stand, then position 9 is the only position with the 2′F modification in the sense strand. If position 9 and only one other base between positions 5 and 11 of the sense strand are purines, then both of these purines are the only two positions with the 2′F modification in the sense strand. If position 9 and only two other bases between positions 5 and 11 of the sense strand are purines, and those two other purines are in adjacent positions so that there would be not three 2′F modifications in a row, then any combination of 2′F modifications can be made that give three 2′F modifications in total. If there are >2 purines between positions 5 and 11 of the sense strand, then all combinations of purines having the 2′F modification are allowed that have three to five 2′F modifications in total, provided that the sense strand does not have three 2′F modifications in a row.

[0446] In some cases, position 9 of the sense strand can be a 2′deoxy. In these cases, 2′F and 2′OMe modifications may occur at the other positions of the sense strand.

[0447] In some cases, the sense strand of any of the siRNAs of subset F comprises a modification pattern which conforms to these sense strand rules (Table 21).

[0448] In some cases, the antisense strand of any of the siRNAs of subset F comprise a modification or modification pattern. Some such examples are included in Table 21. Table 22 includes some additional sense strand modifications of the siRNAs in Table 20. The siRNAs in subset F may comprise any other modification pattern(s).

TABLE 21
subset G

| SEQ | Sense strand sequence | SEQ | Antisense strand sequence |
|---|---|---|---|
| ID NO: | (5′-3′) | ID NO: | (5′-3′) |
| 10981 | uuuaaUfaUfCfcggcauuauasusu | 11001 | usAfsuAfaUfgCfcGfgAfuAfuUfaAfasusu |
| 10982 | uuaaUfaUfcCfggcauuaugasusu | 11002 | usCfsaUfaAfuGfcCfgGfaUfaUfuAfasusu |
| 10983 | uucagaUfaUfaCfaugaauuasusu | 11003 | usAfsaUfuCfaUfgUfaUfaUfcUfgAfasusu |
| 10984 | cugugaaaCfUfuuuagguuasusu | 11004 | usAfsaCfcUfaAfaAfgUfuUfcAfcAfgsusu |
| 10985 | acauuAfucAfcAfggacauuasusu | 11005 | usAfsaUfgUfcCfuGfuGfaUfaAfuGfususu |
| 10986 | aauuAfAfGfAfAfgcaaacaccasusu | 11006 | usGfsgUfgUfuUfgCfuUfcUfuAfaUfususu |
| 10987 | auccCfaaUfUfUfUfguucguaasusu | 11007 | usUfsaCfgAfaCfaAfaAfuUfgGfgAfususu |
| 10988 | ccaauuuuGfuucguacuuasusu | 11008 | usAfsaGfuAfcGfaAfcAfaAfaUfuGfgsusu |
| 10989 | caauUfUfugUfUfcguacuuuasusu | 11009 | usAfsaAfgUfaCfgAfaCfaAfaAfuUfgsusu |
| 10990 | uguuCfgUfaCfUfuuucuuacasusu | 11010 | usGfsuAfaGfaAfaAfgUfaCfgAfaCfasusu |
| 10991 | ugacaCfUfUfCfaUfccaauagasusu | 11011 | usCfsuAfuUfgGfaUfgAfaGfuGfuCfasusu |
| 10992 | uugaaUfaaUfUfucaauggcasusu | 11012 | usGfscCfaUfuGfaAfaUfuAfuUfcAfasusu |
| 10993 | ugaaUfaaUfUfUfCfaauggcgasusu | 11013 | usCfsgCfcAfuUfgAfaAfuUfaUfuCfasusu |
| 10994 | gaauaaUfUfUfCfaauggcguasusu | 11014 | usAfscGfcCfaUfuGfaAfaUfuAfuUfcsusu |
| 10995 | aacuUfaagUfCfaaucaaucasusu | 11015 | usGfsaUfuGfaUfuGfaCfuUfaAfgUfususu |
| 10996 | acagaUfUfaUfUfuguucaacasusu | 11016 | usGfsuUfgAfaCfaAfaUfaAfuCfuGfususu |
| 10997 | aacacuuuAfuAfaacugucasusu | 11017 | usGfsaCfaGfuUfuAfuAfaAfgUfgUfususu |
| 10998 | aaagAfcuuAfcAfaacgggaasusu | 11018 | usUfscCfcGfuUfuGfuAfaGfuCfuUfususu |
| 10999 | auguAfGfucAfuugacacugasusu | 11019 | usCfsaGfuGfuCfaAfuGfaCfuAfcAfususu |
| 11000 | agucAfuuGfAfcAfcuggaauasusu | 11020 | usAfsuUfcCfaGfuGfuCfaAfuGfaCfususu |

TABLE 22
Subset H

| SEQ | Sense strand sequence | SEQ | Antisense strand sequence |
|---|---|---|---|
| ID NO: | (5′-3′) | ID NO: | (5′-3′) |
| 11021 | uuuaaUfauCfCfggcauuauasusu | 11001 | usAfsuAfaUfgCfcGfgAfuAfuUfaAfasusu |
| 11022 | uuaaUfauCfCfggcauuaugasusu | 11002 | usCfsaUfaAfuGfcCfgGfaUfaUfuAfasusu |
| 11023 | cugugaaaCfuUfuuagguuasusu | 11004 | usAfsaCfcUfaAfaAfgUfuUfcAfcAfgsusu |
| 11024 | aauuaaGfaAfGfcaaacaccasusu | 11006 | usGfsgUfgUfuUfgCfuUfcUfuAfaUfususu |
| 11025 | aauuaaGfAfAfGfcaaacaccasusu | 11006 | usGfsgUfgUfuUfgCfuUfcUfuAfaUfususu |
| 11026 | aauuaAfgaAfGfcaaacaccasusu | 11006 | usGfsgUfgUfuUfgCfuUfcUfuAfaUfususu |
| 11027 | aauuaAfgAfAfgcaaacaccasusu | 11006 | usGfsgUfgUfuUfgCfuUfcUfuAfaUfususu |
| 11028 | aauuaAfGfaAfgcaaacaccasusu | 11006 | usGfsgUfgUfuUfgCfuUfcUfuAfaUfususu |
| 11029 | aauuaAfGfaAfGfcaaacaccasusu | 11006 | usGfsgUfgUfuUfgCfuUfcUfuAfaUfususu |
| 11030 | aauuaAfGfAfAfgcaaacaccasusu | 11006 | usGfsgUfgUfuUfgCfuUfcUfuAfaUfususu |
| 11031 | aauuaAfGfAfAfGfcaaacaccasusu | 11006 | usGfsgUfgUfuUfgCfuUfcUfuAfaUfususu |
| 11032 | aauuAfagaAfGfcaaacaccasusu | 11006 | usGfsgUfgUfuUfgCfuUfcUfuAfaUfususu |
| 11033 | aauuAfagAfAfgcaaacaccasusu | 11006 | usGfsgUfgUfuUfgCfuUfcUfuAfaUfususu |
| 11034 | aauuAfaGfaAfgcaaacaccasusu | 11006 | usGfsgUfgUfuUfgCfuUfcUfuAfaUfususu |
| 11035 | aauuAfaGfaAfGfcaaacaccasusu | 11006 | usGfsgUfgUfuUfgCfuUfcUfuAfaUfususu |
| 11036 | aauuAfaGfAfAfGfcaaacaccasusu | 11006 | usGfsgUfgUfuUfgCfuUfcUfuAfaUfususu |
| 11037 | aauuAfAfgaAfgcaaacaccasusu | 11006 | usGfsgUfgUfuUfgCfuUfcUfuAfaUfususu |
| 11038 | aauuAfAfgaAfGfcaaacaccasusu | 11006 | usGfsgUfgUfuUfgCfuUfcUfuAfaUfususu |
| 11039 | aauuAfAfgAfAfgcaaacaccasusu | 11006 | usGfsgUfgUfuUfgCfuUfcUfuAfaUfususu |
| 11040 | aucccaaUfUfuUfguucguaasusu | 11007 | usUfsaCfgAfaCfaAfaAfuUfgGfgAfususu |
| 11041 | aucccaaUfUfUfUfguucguaasusu | 11007 | usUfsaCfgAfaCfaAfaAfuUfgGfgAfususu |
| 11042 | auccCfaauUfuUfguucguaasusu | 11007 | usUfsaCfgAfaCfaAfaAfuUfgGfgAfususu |
| 11043 | auccCfaauUfUfuguucguaasusu | 11007 | usUfsaCfgAfaCfaAfaAfuUfgGfgAfususu |
| 11044 | auccCfaaUfUfuuguucguaasusu | 11007 | usUfsaCfgAfaCfaAfaAfuUfgGfgAfususu |
| 11045 | auccCfaaUfUfuUfguucguaasusu | 11007 | usUfsaCfgAfaCfaAfaAfuUfgGfgAfususu |
| 11046 | caauuuUfgUfuCfguacuuuasusu | 11009 | usAfsaAfgUfaCfgAfaCfaAfaAfuUfgsusu |
| 11047 | caauuuUfgUfUfcguacuuuasusu | 11009 | usAfsaAfgUfaCfgAfaCfaAfaAfuUfgsusu |
| 11048 | caauuUfugUfuCfguacuuuasusu | 11009 | usAfsaAfgUfaCfgAfaCfaAfaAfuUfgsusu |
| 11049 | caauuUfugUfUfcguacuuuasusu | 11009 | usAfsaAfgUfaCfgAfaCfaAfaAfuUfgsusu |
| 11050 | caauuUfUfgUfucguacuuuasusu | 11009 | usAfsaAfgUfaCfgAfaCfaAfaAfuUfgsusu |
| 11051 | caauuUfUfgUfuCfguacuuuasusu | 11009 | usAfsaAfgUfaCfgAfaCfaAfaAfuUfgsusu |
| 11052 | caauuUfUfgUfUfcguacuuuasusu | 11009 | usAfsaAfgUfaCfgAfaCfaAfaAfuUfgsusu |
| 11053 | caauUfuugUfuCfguacuuuasusu | 11009 | usAfsaAfgUfaCfgAfaCfaAfaAfuUfgsusu |
| 11054 | caauUfuugUfUfcguacuuuasusu | 11009 | usAfsaAfgUfaCfgAfaCfaAfaAfuUfgsusu |
| 11055 | caauUfuUfgUfucguacuuuasusu | 11009 | usAfsaAfgUfaCfgAfaCfaAfaAfuUfgsusu |
| 11056 | caauUfuUfgUfuCfguacuuuasusu | 11009 | usAfsaAfgUfaCfgAfaCfaAfaAfuUfgsusu |
| 11057 | caauUfuUfgUfUfcguacuuuasusu | 11009 | usAfsaAfgUfaCfgAfaCfaAfaAfuUfgsusu |
| 11058 | caauUfUfugUfucguacuuuasusu | 11009 | usAfsaAfgUfaCfgAfaCfaAfaAfuUfgsusu |
| 11059 | caauUfUfugUfuCfguacuuuasusu | 11009 | usAfsaAfgUfaCfgAfaCfaAfaAfuUfgsusu |
| 11060 | uguucgUfaCfuUfuucuuacasusu | 11010 | usGfsuAfaGfaAfaAfgUfaCfgAfaCfasusu |
| 11061 | uguucgUfaCfUfuuucuuacasusu | 11010 | usGfsuAfaGfaAfaAfgUfaCfgAfaCfasusu |
| 11062 | uguuCfguaCfuUfuucuuacasusu | 11010 | usGfsuAfaGfaAfaAfgUfaCfgAfaCfasusu |
| 11063 | uguuCfguaCfUfuuucuuacasusu | 11010 | usGfsuAfaGfaAfaAfgUfaCfgAfaCfasusu |
| 11064 | uguuCfgUfaCfuuuucuuacasusu | 11010 | usGfsuAfaGfaAfaAfgUfaCfgAfaCfasusu |
| 11065 | uguuCfgUfaCfuUfuucuuacasusu | 11010 | usGfsuAfaGfaAfaAfgUfaCfgAfaCfasusu |
| 11066 | ugacacuUfCfaUfccaauagasusu | 11011 | usCfsuAfuUfgGfaUfgAfaGfuGfuCfasusu |
| 11067 | ugacacUfuCfaUfccaauagasusu | 11011 | usCfsuAfuUfgGfaUfgAfaGfuGfuCfasusu |
| 11068 | ugacaCfuuCfaUfccaauagasusu | 11011 | usCfsuAfuUfgGfaUfgAfaGfuGfuCfasusu |
| 11069 | ugacaCfuUfCfauccaauagasusu | 11011 | usCfsuAfuUfgGfaUfgAfaGfuGfuCfasusu |
| 11070 | ugacaCfuUfCfaUfccaauagasusu | 11011 | usCfsuAfuUfgGfaUfgAfaGfuGfuCfasusu |
| 11071 | ugacaCfUfuCfauccaauagasusu | 11011 | usCfsuAfuUfgGfaUfgAfaGfuGfuCfasusu |
| 11072 | ugacaCfUfuCfaUfccaauagasusu | 11011 | usCfsuAfuUfgGfaUfgAfaGfuGfuCfasusu |
| 11073 | ugacaCfUfUfCfauccaauagasusu | 11011 | usCfsuAfuUfgGfaUfgAfaGfuGfuCfasusu |
| 11074 | uugaaUfaaUfuUfcaauggcasusu | 11012 | usGfscCfaUfuGfaAfaUfuAfuUfcAfasusu |
| 11075 | ugaauaaUfUfuCfaauggcgasusu | 11013 | usCfsgCfcAfuUfgAfaAfuUfaUfuCfasusu |
| 11076 | ugaauaaUfUfUfCfaauggcgasusu | 11013 | usCfsgCfcAfuUfgAfaAfuUfaUfuCfasusu |
| 11077 | ugaaUfaauUfuCfaauggcgasusu | 11013 | usCfsgCfcAfuUfgAfaAfuUfaUfuCfasusu |
| 11078 | ugaaUfaauUfUfcaauggcgasusu | 11013 | usCfsgCfcAfuUfgAfaAfuUfaUfuCfasusu |
| 11079 | ugaaUfaaUfUfucaauggcgasusu | 11013 | usCfsgCfcAfuUfgAfaAfuUfaUfuCfasusu |
| 11080 | ugaaUfaaUfUfuCfaauggcgasusu | 11013 | usCfsgCfcAfuUfgAfaAfuUfaUfuCfasusu |
| 11081 | gaauaaUfuUfCfaauggcguasusu | 11014 | usAfscGfcCfaUfuGfaAfaUfuAfuUfcsusu |
| 11082 | acagauUfaUfuUfguucaacasusu | 11016 | usGfsuUfgAfaCfaAfaUfaAfuCfuGfususu |
| 11083 | acagauUfaUfUfuguucaacasusu | 11016 | usGfsuUfgAfaCfaAfaUfaAfuCfuGfususu |
| 11084 | acagaUfuaUfuUfguucaacasusu | 11016 | usGfsuUfgAfaCfaAfaUfaAfuCfuGfususu |
| 11085 | acagaUfuaUfUfuguucaacasusu | 11016 | usGfsuUfgAfaCfaAfaUfaAfuCfuGfususu |
| 11086 | acagaUfUfaUfuuguucaacasusu | 11016 | usGfsuUfgAfaCfaAfaUfaAfuCfuGfususu |
| 11087 | acagaUfUfaUfuUfguucaacasusu | 11016 | usGfsuUfgAfaCfaAfaUfaAfuCfuGfususu |
| 11088 | agucauuGfAfcAfcuggaauasusu | 11020 | usAfsuUfcCfaGfuGfuCfaAfuGfaCfususu |
| 11089 | agucAfuugAfcAfcuggaauasusu | 11020 | usAfsuUfcCfaGfuGfuCfaAfuGfaCfususu |
| 11090 | agucAfuuGfAfcacuggaauasusu | 11020 | usAfsuUfcCfaGfuGfuCfaAfuGfaCfususu |

[0449] Therapeutic siRNAs were designed to target human SOS2 as described above and, in some cases, the SOS2 sequence of at least one toxicology-relevant species, in this case, the non-human primate (NHP) cynomolgus monkey. The siRNAs included in subset I had the following characteristics: Cross-reactivity with 19mer in human SOS2 mRNA and with 17mer/19mer in cynomolgus monkey SOS2; Specificity category: Subset E siRNAs for human with a specificity category of AS1 or better and SS2 or better, specificity category AS2 or better and SS3 or better for cynomolgus monkey, and specificity category AS2 or better and SS3 or better for mouse.

[0450] Subset I includes 25 siRNAs whose base sequences are shown in Table 23.

TABLE 23
Subset I

| Sense | Antisense |
|---|---|
| SEQ ID NO: | SEQ ID NO: |
| 888 | 6378 |
| 1683 | 7173 |
| 1684 | 7174 |
| 1912 | 7402 |
| 1922 | 7412 |
| 1927 | 7417 |
| 1938 | 7428 |
| 2014 | 7504 |
| 2167 | 7657 |
| 2213 | 7703 |
| 2362 | 7852 |
| 2364 | 7854 |
| 2365 | 7855 |
| 2598 | 8088 |
| 2631 | 8121 |
| 2759 | 8249 |
| 2890 | 8380 |
| 3231 | 8721 |
| 3259 | 8749 |
| 3333 | 8823 |
| 3487 | 8977 |
| 3491 | 8981 |
| 3586 | 9076 |
| 3587 | 9077 |
| 3756 | 9246 |

[0451] In some cases, position 9 of the sense strand can be a 2′deoxy. In these cases, 2′F and 2′OMe modifications may occur at the other positions of the sense strand.

[0452] In some cases, the sense strand of any of the siRNAs of subset I comprises a modification pattern which conforms to the sense strand rules as described for the sequences in Table 21 (Table 24).

[0453] In some cases, the antisense strand of any of the siRNAs of subset I comprise a modification or modification pattern. Some such examples are included in Table 24. Table 25 includes some additional sense strand modifications of the siRNAs in Table 23. The siRNAs in subset I may comprise any other modification pattern(s).

TABLE 24
Subset J

| SEQ | Sense strand sequence | SEQ | Antisense strand sequence |
|---|---|---|---|
| ID NO: | (5′-3′) | ID NO: | (5′-3′) |
| 11091 | acuacuAfuGfAfucuugucaasusu | 11116 | usUfsgAfcAfaGfaUfcAfuAfgUfaGfususu |
| 11092 | auggcuuAfAfuGfaucaguuasusu | 11117 | usAfsaCfuGfaUfcAfuUfaAfgCfcAfususu |
| 11093 | uggcUfUfaaUfgaucaguugasusu | 11118 | usCfsaAfcUfgAfuCfaUfuAfaGfcCfasusu |
| 11094 | uauuUfCfUfCfUfucauuaucgasusu | 11119 | usCfsgAfuAfaUfgAfaGfaGfaAfaUfasusu |
| 11095 | cauuaUfCfgUfaguacucuaasusu | 11120 | usUfsaGfaGfuAfcUfaCfgAfuAfaUfgsusu |
| 11096 | ucguagUfaCfUfcuagaucgasusu | 11121 | usCfsgAfuCfuAfgAfgUfaCfuAfcGfasusu |
| 11097 | uagaucGfaAfuGfuuagauuasusu | 11122 | usAfsaUfcUfaAfcAfuUfcGfaUfcUfasusu |
| 11098 | ucguUfUfugUfaguaaaagaasusu | 11123 | usUfscUfuUfuAfcUfaCfaAfaAfcGfasusu |
| 11099 | uuuuCfUfuaCfCfacauaucgasusu | 11124 | usCfsgAfuAfuGfuGfgUfaAfgAfaAfasusu |
| 11100 | agcuuAfcuGfAfuugaacggasusu | 11125 | usCfscGfuUfcAfaUfcAfgUfaAfgCfususu |
| 11101 | uguauuucGfGfcauuggguasusu | 11126 | usAfscCfcAfaUfgCfcGfaAfaUfaCfasusu |
| 11102 | uauuUfCfggCfaUfuggguugasusu | 11127 | usCfsaAfcCfcAfaUfgCfcGfaAfaUfasusu |
| 11103 | auuucGfGfcAfuuggguugaasusu | 11128 | usUfscAfaCfcCfaAfuGfcCfgAfaAfususu |
| 11104 | aguuuGfAfAfAfcAfuuugaucasusu | 11129 | usGfsaUfcAfaAfuGfuUfuCfaAfaCfususu |
| 11105 | caauAfGfAfAfAfuugcacgucasusu | 11130 | usGfsaCfgUfgCfaAfuUfuCfuAfuUfgsusu |
| 11106 | augaUfUfcgCfCfauaccacaasusu | 11131 | usUfsgUfgGfuAfuGfgCfgAfaUfcAfususu |
| 11107 | uuucAfAfuGfGfcGfuauuggaasusu | 11132 | usUfscCfaAfuAfcGfcCfaUfuGfaAfasusu |
| 11108 | uacgGfAfuAfGfaAfccagauaasusu | 11133 | usUfsaUfcUfgGfuUfcUfaUfcCfgUfasusu |
| 11109 | cuuuGfAfAfAfAfccuuaacccasusu | 11134 | usGfsgGfuUfaAfgGfuUfuUfcAfaAfgsusu |
| 11110 | aaauUfgaaCfCfucgaaacuasusu | 11135 | usAfsgUfuUfcGfaGfgUfuCfaAfuUfususu |
| 11111 | uaaaAfuAfaGfcuuuagucgasusu | 11136 | usCfsgAfcUfaAfaGfcUfuAfuUfuUfasusu |
| 11112 | auaagCfUfUfUfagucggauuasusu | 11137 | usAfsaUfcCfgAfcUfaAfaGfcUfuAfususu |
| 11113 | uucagaCfCfUfUfaguguauuasusu | 11138 | usAfsaUfaCfaCfuAfaGfgUfcUfgAfasusu |
| 11114 | ucagaCfCfUfUfaguguauuuasusu | 11139 | usAfsaAfuAfcAfcUfaAfgGfuCfuGfasusu |
| 11115 | aguuUfgaUfCfaUfgaugcuuasusu | 11140 | usAfsaGfcAfuCfaUfgAfuCfaAfaCfususu |

TABLE 25
Subset K

| SEQ | Sense strand sequence | SEQ ID | Antisense strand sequence |
|---|---|---|---|
| ID NO: | (5′-3′) | NO: | (5′-3′) |
| 11141 | uauuucuCfUfuCfauuaucgasusu | 11119 | usCfsgAfuAfaUfgAfaGfaGfaAfaUfasusu |
| 11142 | uauuucuCfUfUfCfauuaucgasusu | 11119 | usCfsgAfuAfaUfgAfaGfaGfaAfaUfasusu |
| 11143 | uauuucUfcUfuCfauuaucgasusu | 11119 | usCfsgAfuAfaUfgAfaGfaGfaAfaUfasusu |
| 11144 | uauuucUfcUfUfcauuaucgasusu | 11119 | usCfsgAfuAfaUfgAfaGfaGfaAfaUfasusu |
| 11145 | uauuucUfCfUfUfcauuaucgasusu | 11119 | usCfsgAfuAfaUfgAfaGfaGfaAfaUfasusu |
| 11146 | uauuucUfCfUfUfCfauuaucgasusu | 11119 | usCfsgAfuAfaUfgAfaGfaGfaAfaUfasusu |
| 11147 | uauuuCfucUfuCfauuaucgasusu | 11119 | usCfsgAfuAfaUfgAfaGfaGfaAfaUfasusu |
| 11148 | uauuuCfucUfUfcauuaucgasusu | 11119 | usCfsgAfuAfaUfgAfaGfaGfaAfaUfasusu |
| 11149 | uauuuCfuCfUfucauuaucgasusu | 11119 | usCfsgAfuAfaUfgAfaGfaGfaAfaUfasusu |
| 11150 | uauuuCfuCfUfuCfauuaucgasusu | 11119 | usCfsgAfuAfaUfgAfaGfaGfaAfaUfasusu |
| 11151 | uauuuCfuCfUfUfCfauuaucgasusu | 11119 | usCfsgAfuAfaUfgAfaGfaGfaAfaUfasusu |
| 11152 | uauuuCfUfcUfucauuaucgasusu | 11119 | usCfsgAfuAfaUfgAfaGfaGfaAfaUfasusu |
| 11153 | uauuuCfUfcUfuCfauuaucgasusu | 11119 | usCfsgAfuAfaUfgAfaGfaGfaAfaUfasusu |
| 11154 | uauuuCfUfcUfUfcauuaucgasusu | 11119 | usCfsgAfuAfaUfgAfaGfaGfaAfaUfasusu |
| 11155 | uauuuCfUfCfUfucauuaucgasusu | 11119 | usCfsgAfuAfaUfgAfaGfaGfaAfaUfasusu |
| 11156 | uauuuCfUfCfUfuCfauuaucgasusu | 11119 | usCfsgAfuAfaUfgAfaGfaGfaAfaUfasusu |
| 11157 | uauuuCfUfCfUfUfcauuaucgasusu | 11119 | usCfsgAfuAfaUfgAfaGfaGfaAfaUfasusu |
| 11158 | uauuUfcucUfuCfauuaucgasusu | 11119 | usCfsgAfuAfaUfgAfaGfaGfaAfaUfasusu |
| 11159 | uauuUfcucUfUfcauuaucgasusu | 11119 | usCfsgAfuAfaUfgAfaGfaGfaAfaUfasusu |
| 11160 | uauuUfcuCfUfucauuaucgasusu | 11119 | usCfsgAfuAfaUfgAfaGfaGfaAfaUfasusu |
| 11161 | uauuUfcuCfUfuCfauuaucgasusu | 11119 | usCfsgAfuAfaUfgAfaGfaGfaAfaUfasusu |
| 11162 | uauuUfcuCfUfUfCfauuaucgasusu | 11119 | usCfsgAfuAfaUfgAfaGfaGfaAfaUfasusu |
| 11163 | uauuUfcUfcUfucauuaucgasusu | 11119 | usCfsgAfuAfaUfgAfaGfaGfaAfaUfasusu |
| 11164 | uauuUfcUfcUfuCfauuaucgasusu | 11119 | usCfsgAfuAfaUfgAfaGfaGfaAfaUfasusu |
| 11165 | uauuUfcUfcUfUfcauuaucgasusu | 11119 | usCfsgAfuAfaUfgAfaGfaGfaAfaUfasusu |
| 11166 | uauuUfcUfCfUfUfcauuaucgasusu | 11119 | usCfsgAfuAfaUfgAfaGfaGfaAfaUfasusu |
| 11167 | uauuUfCfucUfucauuaucgasusu | 11119 | usCfsgAfuAfaUfgAfaGfaGfaAfaUfasusu |
| 11168 | uauuUfCfucUfuCfauuaucgasusu | 11119 | usCfsgAfuAfaUfgAfaGfaGfaAfaUfasusu |
| 11169 | uauuUfCfucUfUfcauuaucgasusu | 11119 | usCfsgAfuAfaUfgAfaGfaGfaAfaUfasusu |
| 11170 | uauuUfCfuCfUfucauuaucgasusu | 11119 | usCfsgAfuAfaUfgAfaGfaGfaAfaUfasusu |
| 11171 | uauuUfCfuCfUfuCfauuaucgasusu | 11119 | usCfsgAfuAfaUfgAfaGfaGfaAfaUfasusu |
| 11172 | ucguagUfaCfuCfuagaucgasusu | 11121 | usCfsgAfuCfuAfgAfgUfaCfuAfcGfasusu |
| 11173 | uagaucgAfAfuGfuuagauuasusu | 11122 | usAfsaUfcUfaAfcAfuUfcGfaUfcUfasusu |
| 11174 | ucguuUfUfgUfaguaaaagaasusu | 11123 | usUfscUfuUfuAfcUfaCfaAfaAfcGfasusu |
| 11175 | ucguUfuUfgUfaguaaaagaasusu | 11123 | usUfscUfuUfuAfcUfaCfaAfaAfcGfasusu |
| 11176 | uuuucuUfaCfCfacauaucgasusu | 11124 | usCfsgAfuAfuGfuGfgUfaAfgAfaAfasusu |
| 11177 | uuuucUfuaCfCfacauaucgasusu | 11124 | usCfsgAfuAfuGfuGfgUfaAfgAfaAfasusu |
| 11178 | uuuucUfUfaCfcacauaucgasusu | 11124 | usCfsgAfuAfuGfuGfgUfaAfgAfaAfasusu |
| 11179 | uuuucUfUfaCfCfacauaucgasusu | 11124 | usCfsgAfuAfuGfuGfgUfaAfgAfaAfasusu |
| 11180 | uuuuCfuuaCfCfacauaucgasusu | 11124 | usCfsgAfuAfuGfuGfgUfaAfgAfaAfasusu |
| 11181 | uuuuCfuUfaCfcacauaucgasusu | 11124 | usCfsgAfuAfuGfuGfgUfaAfgAfaAfasusu |
| 11182 | uuuuCfuUfaCfCfacauaucgasusu | 11124 | usCfsgAfuAfuGfuGfgUfaAfgAfaAfasusu |
| 11183 | uuuuCfUfuaCfcacauaucgasusu | 11124 | usCfsgAfuAfuGfuGfgUfaAfgAfaAfasusu |
| 11184 | uauuuCfggCfaUfuggguugasusu | 11127 | usCfsaAfcCfcAfaUfgCfcGfaAfaUfasusu |
| 11185 | uauuUfcggCfaUfuggguugasusu | 11127 | usCfsaAfcCfcAfaUfgCfcGfaAfaUfasusu |
| 11186 | uauuUfCfggCfauuggguugasusu | 11127 | usCfsaAfcCfcAfaUfgCfcGfaAfaUfasusu |
| 11187 | aguuugaAfAfcAfuuugaucasusu | 11129 | usGfsaUfcAfaAfuGfuUfuCfaAfaCfususu |
| 11188 | aguuugAfaAfcAfuuugaucasusu | 11129 | usGfsaUfcAfaAfuGfuUfuCfaAfaCfususu |
| 11189 | aguuuGfaaAfcAfuuugaucasusu | 11129 | usGfsaUfcAfaAfuGfuUfuCfaAfaCfususu |
| 11190 | aguuuGfaAfAfcauuugaucasusu | 11129 | usGfsaUfcAfaAfuGfuUfuCfaAfaCfususu |
| 11191 | aguuuGfaAfAfcAfuuugaucasusu | 11129 | usGfsaUfcAfaAfuGfuUfuCfaAfaCfususu |
| 11192 | aguuuGfAfaAfcauuugaucasusu | 11129 | usGfsaUfcAfaAfuGfuUfuCfaAfaCfususu |
| 11193 | aguuuGfAfaAfcAfuuugaucasusu | 11129 | usGfsaUfcAfaAfuGfuUfuCfaAfaCfususu |
| 11194 | aguuuGfAfAfAfcauuugaucasusu | 11129 | usGfsaUfcAfaAfuGfuUfuCfaAfaCfususu |
| 11195 | caauaGfaAfAfuugcacgucasusu | 11130 | usGfsaCfgUfgCfaAfuUfuCfuAfuUfgsusu |
| 11196 | caauaGfAfaAfuugcacgucasusu | 11130 | usGfsaCfgUfgCfaAfuUfuCfuAfuUfgsusu |
| 11197 | caauaGfAfAfAfuugcacgucasusu | 11130 | usGfsaCfgUfgCfaAfuUfuCfuAfuUfgsusu |
| 11198 | caauAfgaAfAfuugcacgucasusu | 11130 | usGfsaCfgUfgCfaAfuUfuCfuAfuUfgsusu |
| 11199 | caauAfgAfaAfuugcacgucasusu | 11130 | usGfsaCfgUfgCfaAfuUfuCfuAfuUfgsusu |
| 11200 | caauAfGfaaAfuugcacgucasusu | 11130 | usGfsaCfgUfgCfaAfuUfuCfuAfuUfgsusu |
| 11201 | caauAfGfaAfAfuugcacgucasusu | 11130 | usGfsaCfgUfgCfaAfuUfuCfuAfuUfgsusu |
| 11202 | augauuCfgCfCfauaccacaasusu | 11131 | usUfsgUfgGfuAfuGfgCfgAfaUfcAfususu |
| 11203 | augauUfcgCfCfauaccacaasusu | 11131 | usUfsgUfgGfuAfuGfgCfgAfaUfcAfususu |
| 11204 | augauUfCfgCfcauaccacaasusu | 11131 | usUfsgUfgGfuAfuGfgCfgAfaUfcAfususu |
| 11205 | augauUfCfgCfCfauaccacaasusu | 11131 | usUfsgUfgGfuAfuGfgCfgAfaUfcAfususu |
| 11206 | augaUfucgCfCfauaccacaasusu | 11131 | usUfsgUfgGfuAfuGfgCfgAfaUfcAfususu |
| 11207 | augaUfuCfgCfcauaccacaasusu | 11131 | usUfsgUfgGfuAfuGfgCfgAfaUfcAfususu |
| 11208 | augaUfuCfgCfCfauaccacaasusu | 11131 | usUfsgUfgGfuAfuGfgCfgAfaUfcAfususu |
| 11209 | augaUfUfcgCfcauaccacaasusu | 11131 | usUfsgUfgGfuAfuGfgCfgAfaUfcAfususu |
| 11210 | uuucaauGfGfcGfuauuggaasusu | 11132 | usUfscCfaAfuAfcGfcCfaUfuGfaAfasusu |
| 11211 | uuucaAfugGfcGfuauuggaasusu | 11132 | usUfscCfaAfuAfcGfcCfaUfuGfaAfasusu |
| 11212 | uuucaAfuGfGfcguauuggaasusu | 11132 | usUfscCfaAfuAfcGfcCfaUfuGfaAfasusu |
| 11213 | uuucaAfuGfGfcGfuauuggaasusu | 11132 | usUfscCfaAfuAfcGfcCfaUfuGfaAfasusu |
| 11214 | uuucAfaugGfcGfuauuggaasusu | 11132 | usUfscCfaAfuAfcGfcCfaUfuGfaAfasusu |
| 11215 | uuucAfauGfGfcguauuggaasusu | 11132 | usUfscCfaAfuAfcGfcCfaUfuGfaAfasusu |
| 11216 | uuucAfauGfGfcGfuauuggaasusu | 11132 | usUfscCfaAfuAfcGfcCfaUfuGfaAfasusu |
| 11217 | uuucAfAfugGfcguauuggaasusu | 11132 | usUfscCfaAfuAfcGfcCfaUfuGfaAfasusu |
| 11218 | uuucAfAfugGfcGfuauuggaasusu | 11132 | usUfscCfaAfuAfcGfcCfaUfuGfaAfasusu |
| 11219 | uuucAfAfuGfGfcguauuggaasusu | 11132 | usUfscCfaAfuAfcGfcCfaUfuGfaAfasusu |
| 11220 | uacggauAfGfaAfccagauaasusu | 11133 | usUfsaUfcUfgGfuUfcUfaUfcCfgUfasusu |
| 11221 | uacggauAfGfAfAfccagauaasusu | 11133 | usUfsaUfcUfgGfuUfcUfaUfcCfgUfasusu |
| 11222 | uacggAfuaGfaAfccagauaasusu | 11133 | usUfsaUfcUfgGfuUfcUfaUfcCfgUfasusu |
| 11223 | uacggAfuaGfAfaccagauaasusu | 11133 | usUfsaUfcUfgGfuUfcUfaUfcCfgUfasusu |
| 11224 | uacggAfuAfGfaaccagauaasusu | 11133 | usUfsaUfcUfgGfuUfcUfaUfcCfgUfasusu |
| 11225 | uacggAfuAfGfaAfccagauaasusu | 11133 | usUfsaUfcUfgGfuUfcUfaUfcCfgUfasusu |
| 11226 | uacggAfuAfGfAfAfccagauaasusu | 11133 | usUfsaUfcUfgGfuUfcUfaUfcCfgUfasusu |
| 11227 | uacgGfauaGfaAfccagauaasusu | 11133 | usUfsaUfcUfgGfuUfcUfaUfcCfgUfasusu |
| 11228 | uacgGfauaGfAfaccagauaasusu | 11133 | usUfsaUfcUfgGfuUfcUfaUfcCfgUfasusu |
| 11229 | uacgGfauAfGfaaccagauaasusu | 11133 | usUfsaUfcUfgGfuUfcUfaUfcCfgUfasusu |
| 11230 | uacgGfauAfGfaAfccagauaasusu | 11133 | usUfsaUfcUfgGfuUfcUfaUfcCfgUfasusu |
| 11231 | uacgGfauAfGfAfAfccagauaasusu | 11133 | usUfsaUfcUfgGfuUfcUfaUfcCfgUfasusu |
| 11232 | uacgGfAfuaGfaaccagauaasusu | 11133 | usUfsaUfcUfgGfuUfcUfaUfcCfgUfasusu |
| 11233 | uacgGfAfuaGfaAfccagauaasusu | 11133 | usUfsaUfcUfgGfuUfcUfaUfcCfgUfasusu |
| 11234 | uacgGfAfuaGfAfaccagauaasusu | 11133 | usUfsaUfcUfgGfuUfcUfaUfcCfgUfasusu |
| 11235 | uacgGfAfuAfGfaaccagauaasusu | 11133 | usUfsaUfcUfgGfuUfcUfaUfcCfgUfasusu |
| 11236 | cuuugAfaAfAfccuuaacccasusu | 11134 | usGfsgGfuUfaAfgGfuUfuUfcAfaAfgsusu |
| 11237 | cuuugAfAfaAfccuuaacccasusu | 11134 | usGfsgGfuUfaAfgGfuUfuUfcAfaAfgsusu |
| 11238 | cuuugAfAfAfAfccuuaacccasusu | 11134 | usGfsgGfuUfaAfgGfuUfuUfcAfaAfgsusu |
| 11239 | cuuuGfaaAfAfccuuaacccasusu | 11134 | usGfsgGfuUfaAfgGfuUfuUfcAfaAfgsusu |
| 11240 | cuuuGfaAfaAfccuuaacccasusu | 11134 | usGfsgGfuUfaAfgGfuUfuUfcAfaAfgsusu |
| 11241 | cuuuGfAfaaAfccuuaacccasusu | 11134 | usGfsgGfuUfaAfgGfuUfuUfcAfaAfgsusu |
| 11242 | cuuuGfAfaAfAfccuuaacccasusu | 11134 | usGfsgGfuUfaAfgGfuUfuUfcAfaAfgsusu |
| 11243 | aaauUfgaaCfcUfcgaaacuasusu | 11135 | usAfsgUfuUfcGfaGfgUfuCfaAfuUfususu |
| 11244 | uaaaAfuaAfGfcuuuagucgasusu | 11136 | usCfsgAfcUfaAfaGfcUfuAfuUfuUfasusu |
| 11245 | auaagCfuUfUfagucggauuasusu | 11137 | usAfsaUfcCfgAfcUfaAfaGfcUfuAfususu |
| 11246 | auaagCfUfuUfagucggauuasusu | 11137 | usAfsaUfcCfgAfcUfaAfaGfcUfuAfususu |
| 11247 | uucagaCfcUfUfaguguauuasusu | 11138 | usAfsaUfaCfaCfuAfaGfgUfcUfgAfasusu |
| 11248 | ucagaCfcUfUfaguguauuuasusu | 11139 | usAfsaAfuAfcAfcUfaAfgGfuCfuGfasusu |
| 11249 | ucagaCfCfuUfaguguauuuasusu | 11139 | usAfsaAfuAfcAfcUfaAfgGfuCfuGfasusu |
| 11250 | aguuugaUfCfaUfgaugcuuasusu | 11140 | usAfsaGfcAfuCfaUfgAfuCfaAfaCfususu |
| 11251 | aguuUfgauCfaUfgaugcuuasusu | 11140 | usAfsaGfcAfuCfaUfgAfuCfaAfaCfususu |
| 11252 | aguuUfgaUfCfaugaugcuuasusu | 11140 | usAfsaGfcAfuCfaUfgAfuCfaAfaCfususu |

### Example 11: Modification Motif 1

[0454] An example SOS2 siRNA includes a combination of the following modifications:
[0455] Position 9 (from 5′ to 3′) of the sense strand is 2′ F.
[0456] If position 9 is a pyrimidine then all purines in the Sense Strand are 2′OMe, and 1-5 pyrimidines between positions 5 and 11 are 2′ F provided that there are never three 2′F modifications in a row.
[0457] If position 9 is a purine then all pyrimidines in the Sense Strand are 2′OMe, and 1-5 purines between positions 5 and 11 are 2′ F provided that there are never three 2′F modifications in a row.
[0458] Antisense strand odd-numbered positions are 2′OMe and even-numbered positions are a mixture of 2′ F and 2′ deoxy.

### Example 12: Modification Motif 2

[0459] An example SOS2 siRNA includes a combination of the following modifications:
[0460] Position 9 (from 5′ to 3′) of the sense strand is 2′ deoxy.
[0461] Sense strand positions 5, 7 and 8 are 2′ F.
[0462] All pyrimidines in positions 10-21 are 2′ OMe, and purines are a mixture of 2′ OMe and 2′ F. Alternatively, all purines in positions 10-21 are 2′ OMe and all pyrimidines in positions 10-21 are a mixture of 2 OMe and 2 F.
[0463] Antisense strand odd-numbered positions are 2′OMe and even-numbered positions are a mixture of 2′ F and 2′ deoxy.

### Example 13: GalNAc Ligands for Hepatocyte Targeting of Oligonucleotides

[0464] Without limiting the disclosure to these individual methods, there are at least two general methods for attachment of multivalent N-acetylgalactosamine (GalNAc) ligands to oligonucleotides: solid or solution-phase conjugations. GalNAc ligands may be attached to solid phase resin for 3′ conjugation or at the 5′ terminus using GalNAc phosphoramidite reagents. GalNAc phosphoramidites may be coupled on solid phase as for other nucleosides in the oligonucleotide sequence at any position in the sequence.

[0465] In solution phase conjugation, the oligonucleotide sequence—including a reactive conjugation site—is formed on the resin. The oligonucleotide is then removed from the resin and GalNAc is conjugated to the reactive site.

[0466] The carboxy GalNAc derivatives may be coupled to amino-modified oligonucleotides. The peptide coupling conditions are known to the skilled in the art using a carbodiimide coupling agent like DCC (N,N′-Dicyclohexylcarbodiimide), EDC (N-(3-dimethylaminopropyl)-N′-ethylcarbodiimide) or EDC·HCl (N-(3-dimethylaminopropyl)-N′-ethylcarbodiimide hydrochloride and an additive like HOBt (1-hydroxybenztriazole), HOSu (N-hydroxysuccinimide), TBTU (N,N,N′,N′-Tetramethyl-O-(benzotriazol-1-yl)uronium tetrafluoroborate, HBTU (2-(1H-benzotriazol-1-yl)-1,1,3,3-tetramethyluronium hexafluorophosphate) or HOAt (1-Hydroxy-7-azabenzotriazole and common combinations thereof such as TBTU/HOBt or HBTU/HOAt to form activated amine-reactive esters.

[0467] Amine groups may be incorporated into oligonucleotides using a number of known, commercially available reagents at the 5′ terminus, 3′ terminus or anywhere in between.

[0468] Non-limiting examples of reagents for oligonucleotide synthesis to incorporate an amino group include:
[0469] 5′ attachment:
   [0470] 6-(4-Monomethoxytritylamino)hexyl-(2-cyanoethyl)-(N,N-diisopropyl)-phosphoramidite CAS Number: 114616-27-2
   [0471] 5′-Amino-Modifier TEG CE-Phosphoramidite
   [0472] 10-(O-trifluoroacetamido-N-ethyl)-triethyleneglycol-1-[(2-cyanoethyl)-(N,N-diisopropyl)]-phosphoramidite
[0473] 3′ attachment:
   [0474] 3′-Amino-Modifier Serinol CPG
   [0475] 3-Dimethoxytrityloxy-2-(3-(fluorenylmethoxycarbonylamino)propanamido)propyl-1-O-succinyl-long chain alkylamino-CPG (where CPG stands for controlled-pore glass and is the solid support)
   [0476] Amino-Modifier Serinol Phosphoramidite
   [0477] 3-Dimethoxytrityloxy-2-(3-(fluorenylmethoxycarbonylamino)propanamido)propyl-1-O-(2-cyanoethyl)-(N,N-diisopropyl)-phosphoramidite
[0478] Internal (base modified):
   [0479] Amino-Modifier C6 dT
   [0480] 5′-Dimethoxytrityl-5-[N-(trifluoroacetylaminohexyl)-3-acrylimido]-2′-deoxyUridine,3′-[(2-cyanoethyl)-(N,N-diisopropyl)]-phosphoramidite. CAS Number: 178925-21-8

[0481] Solution phase conjugations may occur after oligonucleotide synthesis via reactions between non-nucleosidic nucleophilic functional groups that are attached to the oligonucleotide and electrophilic GalNAc reagents. Examples of nucleophilic groups include amines and thiols, and examples of electrophilic reagents include activated esters (e.g. N-hydroxysuccinimide, pentafluorophenyl) and maleimides.

TABLE 26
GalNAc Conjugation Reagent

| Type of | |
|---|---|
| conjugation | Structure |
| Solid phase 5' attachment phosphoramidite | [chemical structure] |

[0482] An example of a reagent for GalNAc conjugation to an oligonucleotide is shown in Table 26. For the phosphoramidite in Table 26, m or n may be any value from 1 to 10. For example, m may be 4, and n may be 2. The following is a non-limiting example of a scheme for synthesizing the phosphoramidite in Table 26.

[chemical structure]

[chemical structure]

[chemical structure]

[chemical structure]

[chemical structure]

### Example 14: Screening of siRNAs Targeting Human SOS2 mRNA in Mice Transfected with AAV8-TBG-h-SOS2(5UTR+ORF-Nter)

[0483] Several siRNAs designed to be cross-reactive with human, cynomolgus monkey, rat and mouse SOS2 mRNA were tested for activity in mice following transfection with an adeno-associated viral vector. The siRNAs were attached to the GalNAc ligand ETL17. The siRNA sequences that were used are shown in Table 27, where Nf (e.g. Af, Cf, Gf, Tf, or Uf) is a 2′ fluoro-modified nucleoside, n (e.g. a, c, g, t, or u) is a 2′ O-methyl modified nucleoside, dN (e.g. dA, dC, dG, dT, or dU) is a deoxynucleoside, and “s” is a phosphorothioate linkage.

[0484] Six to eight week old female mice (C57Bl/6) were injected with 10 uL of a recombinant adeno-associated virus 8 (AAV8) vector (1.2×10E13 genome copies/mL) plus 20 ul of PBS for a total volume of 30 ul by the retroorbital route on Day −12. The recombinant AAV8 contains a portion of the 5′ UTR and a portion of the open reading frame of the human SOS2 sequence (ENST00000216373) under the control of the human thyroxine binding globulin promoter in an AAV2 backbone packaged in AAV8 capsid (AAV8-TBG-h-SOS2(5UTR+ORF-Nter)). On Day 0, infected mice (n=5) were given a subcutaneous injection of a single 100 ug dose of a GalNAc-conjugated siRNA or PBS as vehicle control.

[0485] Mice were euthanized on Day 10 after subcutaneous injection and a liver sample from each was collected and placed in RNAlater (ThermoFisher Catalog #AM7020) until processing. Total liver RNA was prepared by homogenizing the liver tissue in homogenization buffer (Maxwell RSC simplyRNA Tissue Kit) using a Percellys 24 tissue homogenizer (Bertin Instruments) set at 5000 rpm for two 10 second cycles. Total RNA from the lysate was purified on a Maxwell RSC 48 platform (Promega Corporation) according to the manufacturer's recommendations. Preparation of cDNA was performed using Quanta qScript cDNA SuperMix (VWR, Catalog #95048-500) according to the manufacturer's instructions. The relative levels of liver SOS2 mRNA were assessed by RT-qPCR in triplicate on a QuantStudio™ 6 Pro Real-Time PCR System using TaqMan assays for human SOS2 (ThermoFisher, assay #Hs01127288_m1), or mouse SOS2 (ThermoFisher, assay #Mm01265231_m1) and the mouse housekeeping gene PPIA (ThermoFisher, assay #Mm02342430_g1) and PerfeCTa® qPCR FastMix®, Low ROX™ (VWR, Catalog #101419-222). Data were normalized to the mean SOS2 mRNA level in animals receiving PBS. Mice injected with ETD02117, ETD02118, ETD02121, ETD02122, ETD02123 and ETD02124 had substantial reductions in mean liver mouse SOS2 mRNA on Day 10 relative to mice receiving PBS. Results are shown in Table 29. Mice injected with ETD02117, ETD02118, ETD2121, ETD02122, ETD02123 and ETD02124 had substantial reductions in mean liver human SOS2 mRNA on Day 10 relative to mice receiving PBS. Results are shown in Table 30.

TABLE 27
Example siRNA Sequences

| | SS | | AS | |
|---|---|---|---|---|
| | SEQ | | SEQ | |
| siRNA | ID | Sense Strand (SS) Sequence | ID | Antisense Strand (AS) Sequence |
| Name | NO: | (5′-3′) with GalNAc moiety | NO: | (5′-3′) |
| ETD02115 | 11254 | [ETL17]suuuaaUfaUfCfcggcauuauasusu | 11264 | usAfsuAfaUfgCfcGfgAfuAfuUfaAfasusu |
| ETD02116 | 11255 | [ETL17]suuaaUfaUfcCfggcauuaugasusu | 11265 | usCfsaUfaAfuGfcCfgGfaUfaUfuAfasusu |
| ETD02117 | 11256 | [ETL17]suucagaUfaUfaCfaugaauuasusu | 11266 | usAfsaUfuCfaUfgUfaUfaUfcUfgAfasusu |
| ETD02118 | 11257 | [ETL17]scuguGfaAfAfdCUfuuuagguuasusu | 11267 | usAfsaCfcUfaAfaAfgUfuUfcAfcAfgsusu |
| ETD02119 | 11258 | [ETL17]sacauuAfucAfcAfggacauuasusu | 11268 | usAfsaUfgUfcCfuGfuGfaUfaAfuGfususu |
| ETD02120 | 11259 | [ETL17]saauuAfAfGfAfAfgcaaacaccasusu | 11269 | usGfsgUfgUfuUfgCfuUfcUfuAfaUfususu |
| ETD02121 | 11260 | [ETL17]sauccCfaaUfUfUfUfguucguaasusu | 11270 | usUfsaCfgAfaCfaAfaAfuUfgGfgAfususu |
| ETD02122 | 11261 | [ETL17]sccaaUfuUfUfdGUfucguacuuasusu | 11271 | usAfsaGfuAfcGfaAfcAfaAfaUfuGfgsusu |
| ETD02123 | 11262 | [ETL17]scaauUfUfugUfUfcguacuuuasusu | 11272 | usAfsaAfgUfaCfgAfaCfaAfaAfuUfgsusu |
| ETD02124 | 11263 | [ETL17]suguuCfgUfaCfUfuuucuuacasusu | 11273 | usGfsuAfaGfaAfaAfgUfaCfgAfaCfasusu |

TABLE 28
Example siRNA Base Sequences

| | SS | | AS | |
|---|---|---|---|---|
| | SEQ | | SEQ | |
| siRNA | ID | Sense Strand (SS) Base Sequence | ID | Antisense Strand (AS) Base |
| Name | NO: | (5′ to 3′) | NO: | Sequence (5′ to 3′) |
| ETD02115 | 11274 | UUUAAUAUCCGGCAUUAUAUU | 11304 | UAUAAUGCCGGAUAUUAAAUU |
| ETD02116 | 11275 | UUAAUAUCCGGCAUUAUGAUU | 11305 | UCAUAAUGCCGGAUAUUAAUU |
| ETD02117 | 11276 | UUCAGAUAUACAUGAAUUAUU | 11306 | UAAUUCAUGUAUAUCUGAAUU |
| ETD02118 | 11277 | CUGUGAAACUUUUAGGUUAUU | 11307 | UAACCUAAAAGUUUCACAGUU |
| ETD02119 | 11278 | ACAUUAUCACAGGACAUUAUU | 11308 | UAAUGUCCUGUGAUAAUGUUU |
| ETD02120 | 11279 | AAUUAAGAAGCAAACACCAUU | 11309 | UGGUGUUUGCUUCUUAAUUUU |
| ETD02121 | 11280 | AUCCCAAUUUUGUUCGUAAUU | 11310 | UUACGAACAAAAUUGGGAUUU |
| ETD02122 | 11281 | CCAAUUUUGUUCGUACUUAUU | 11311 | UAAGUACGAACAAAAUUGGUU |
| ETD02123 | 11282 | CAAUUUUGUUCGUACUUUAUU | 11312 | UAAAGUACGAACAAAAUUGUU |
| ETD02124 | 11283 | UGUUCGUACUUUUCUUACAUU | 11313 | UGUAAGAAAAGUACGAACAUU |
| | SS | | AS | |
| | SEQ | | SEQ | |
| SIRNA | ID | Sense Strand Base Sequence | ID | Antisense Strand Base Sequence |
| Name | NO: | (5′ to 3′), without 3′ overhang | NO: | (5′ to 3′), without 3′ overhang |
| ETD02115 | 11284 | UUUAAUAUCCGGCAUUAUA | 11314 | UAUAAUGCCGGAUAUUAAA |
| ETD02116 | 11285 | UUAAUAUCCGGCAUUAUGA | 11315 | UCAUAAUGCCGGAUAUUAA |
| ETD02117 | 11286 | UUCAGAUAUACAUGAAUUA | 11316 | UAAUUCAUGUAUAUCUGAA |
| ETD02118 | 11287 | CUGUGAAACUUUUAGGUUA | 11317 | UAACCUAAAAGUUUCACAG |
| ETD02119 | 11288 | ACAUUAUCACAGGACAUUA | 11318 | UAAUGUCCUGUGAUAAUGU |
| ETD02120 | 11289 | AAUUAAGAAGCAAACACCA | 11319 | UGGUGUUUGCUUCUUAAUU |
| ETD02121 | 11290 | AUCCCAAUUUUGUUCGUAA | 11320 | UUACGAACAAAAUUGGGAU |
| ETD02122 | 11291 | CCAAUUUUGUUCGUACUUA | 11321 | UAAGUACGAACAAAAUUGG |
| ETD02123 | 11292 | CAAUUUUGUUCGUACUUUA | 11322 | UAAAGUACGAACAAAAUUG |
| ETD02124 | 11293 | UGUUCGUACUUUUCUUACA | 11323 | UGUAAGAAAAGUACGAACA |
| | SS | | AS | |
| | SEQ | Sense Strand Base Sequence | SEQ | Antisense Strand Base Sequence |
| siRNA | ID | (5′ to 3′), | ID | (5′ to 3′), without 3′ |
| Name | NO: | without 3′ overhang and 3′ A | NO: | overhang and 5′U |
| ETD02115 | 11294 | UUUAAUAUCCGGCAUUAU | 11324 | AUAAUGCCGGAUAUUAAA |
| ETD02116 | 11295 | UUAAUAUCCGGCAUUAUG | 11325 | CAUAAUGCCGGAUAUUAA |
| ETD02117 | 11296 | UUCAGAUAUACAUGAAUU | 11326 | AAUUCAUGUAUAUCUGAA |
| ETD02118 | 11297 | CUGUGAAACUUUUAGGUU | 11327 | AACCUAAAAGUUUCACAG |
| ETD02119 | 11298 | ACAUUAUCACAGGACAUU | 11328 | AAUGUCCUGUGAUAAUGU |
| ETD02120 | 11299 | AAUUAAGAAGCAAACACC | 11329 | GGUGUUUGCUUCUUAAUU |
| ETD02121 | 11300 | AUCCCAAUUUUGUUCGUA | 11330 | UACGAACAAAAUUGGGAU |
| ETD02122 | 11301 | CCAAUUUUGUUCGUACUU | 11331 | AAGUACGAACAAAAUUGG |
| ETD02123 | 11302 | CAAUUUUGUUCGUACUUU | 11332 | AAAGUACGAACAAAAUUG |
| ETD02124 | 11303 | UGUUCGUACUUUUCUUAC | 11333 | GUAAGAAAAGUACGAACA |

TABLE 29
Relative mouse SOS2 mRNA Levels in Livers of Mice

| | | | | Mean mouse SOS2 mRNA |
|---|---|---|---|---|
| | | | Dose | (Normalized to Group 1, |
| Group | n | Treatment | (ug) | Day 10) |
| 1 | 5 | Control | 0 | 1.00 |
| 2 | 5 | Control + AAV8 | 0 | 1.05 |
| 3 | 5 | ETD02115 | 100 | 0.89 |
| 4 | 5 | ETD02116 | 100 | 0.72 |
| 5 | 5 | ETD02117 | 100 | 0.49 |
| 6 | 5 | ETD02118 | 100 | 0.31 |
| 7 | 5 | ETD02119 | 100 | 0.77 |
| 8 | 5 | ETD02120 | 100 | 0.80 |
| 9 | 5 | ETD02121 | 100 | 0.46 |
| 10 | 5 | ETD02122 | 100 | 0.49 |
| 11 | 5 | ETD02123 | 100 | 0.39 |
| 12 | 5 | ETD02124 | 100 | 0.20 |

TABLE 30
Relative human SOS2 mRNA Levels in Livers of Mice

| | | | | Mean human SOS2 mRNA |
|---|---|---|---|---|
| | | | Dose | (Normalized to Group 2, |
| Group | n | Treatment | (ug) | Day 10) |
| 1 | 5 | Control | 0 | N/A |
| 2 | 5 | Control + AAV8 | 0 | 1.00 |
| 3 | 5 | ETD02115 | 100 | 0.68 |
| 4 | 5 | ETD02116 | 100 | 0.46 |
| 5 | 5 | ETD02117 | 100 | 0.32 |
| 6 | 5 | ETD02118 | 100 | 0.25 |
| 7 | 5 | ETD02119 | 100 | 0.47 |
| 8 | 5 | ETD02120 | 100 | 0.23 |
| 9 | 5 | ETD02121 | 100 | 0.15 |
| 10 | 5 | ETD02122 | 100 | 0.15 |
| 11 | 5 | ETD02123 | 100 | 0.43 |
| 12 | 5 | ETD02124 | 100 | 0.23 |

### Example 15. Screening of siRNAs Targeting Human SOS2 mRNA in Mice Transfected with AAV8-TBG-h-SOS2(ORF-Cter+3′UTR)

[0486] Several siRNAs designed to be cross-reactive with human, cynomolgus monkey, rat and mouse SOS2 mRNA were tested for activity in mice following transfection with an adeno-associated viral vector. The siRNAs were attached to the GalNAc ligand ETL17. The siRNA sequences are shown in Table 31, where Nf (e.g. Af, Cf, Gf, Tf, or Uf) is a 2′ fluoro-modified nucleoside, n (e.g. a, c, g, t, or u) is a 2′ O-methyl modified nucleoside, dN (e.g. dA, dC, dG, dT, or dU) is a deoxynucleoside, and “s” is a phosphorothioate linkage.

[0487] Six to eight week old female mice (C57Bl/6) were injected with 10 uL of a recombinant adeno-associated virus 8 (AAV8) vector (1.34×10E13 genome copies/mL) plus 20 ul of PBS for a total volume of 30 ul by the retroorbital route on Day −12. The recombinant AAV8 contains a portion of the open reading frame and a portion of the 3′ UTR of the human SOS2 sequence (ENST00000216373) under the control of the human thyroxine binding globulin promoter in an AAV2 backbone packaged in AAV8 capsid (AAV8-TBG-h-SOS2(ORF-Cter+3′UTR)). On Day 0, infected mice (n=5) were given a subcutaneous injection of a single 100 ug dose of a GalNAc-conjugated siRNA or PBS as vehicle control.

[0488] Mice were euthanized on Day 10 after subcutaneous injection and a liver sample from each was collected and placed in RNAlater (ThermoFisher Catalog #AM7020) until processing. Total liver RNA was prepared by homogenizing the liver tissue in homogenization buffer (Maxwell RSC simplyRNA Tissue Kit) using a Percellys 24 tissue homogenizer (Bertin Instruments) set at 5000 rpm for two 10 second cycles. Total RNA from the lysate was purified on a Maxwell RSC 48 platform (Promega Corporation) according to the manufacturer's recommendations. Preparation of cDNA was performed using Quanta qScript cDNA SuperMix (VWR, Catalog #95048-500) according to the manufacturer's instructions. The relative levels of liver SOS2 mRNA were assessed by RT-qPCR in triplicate on a QuantStudio™ 6 Pro Real-Time PCR System using TaqMan assays for human SOS2 (ThermoFisher, assay #Hs01127273_m1), and the mouse housekeeping gene PPIA (ThermoFisher, assay #Mm02342430_g1) and PerfeCTa® qPCR FastMix®, Low ROX™ (VWR, Catalog #101419-222). Mice injected with ETD02125, ETD02126, ETD02127, ETD02128, ETD02129, and ETD02133 had substantial reductions in mean liver human SOS2 mRNA on Day 10 relative to mice receiving PBS. Results are shown in Table 33.

TABLE 31
Example siRNA Sequences

| | SS | | AS | |
|---|---|---|---|---|
| | SEQ | | SEQ | |
| siRNA | ID | Sense Strand Sequence (5′-3′) | ID | |
| Name | NO: | with GalNAc moiety | NO: | Antisense Strand Sequence (5′-3′) |
| ETD02125 | 11334 | [ETL17]sugacaCfUfUfCfaUfccaauagasusu | 11344 | usCfsuAfuUfgGfaUfgAfaGfuGfuCfasusu |
| ETD02126 | 11335 | [ETL17]suugaaUfaaUfUfucaauggcasusu | 11345 | usGfscCfaUfuGfaAfaUfuAfuUfcAfasusu |
| ETD02127 | 11336 | [ETL17]sugaaUfaaUfUfUfCfaauggcgasusu | 11346 | usCfsgCfcAfuUfgAfaAfuUfaUfuCfasusu |
| ETD02128 | 11337 | [ETL17]sgaauaaUfUfUfCfaauggcguasusu | 11347 | usAfscGfcCfaUfuGfaAfaUfuAfuUfcsusu |
| ETD02129 | 11338 | [ETL17]saacuUfaagUfCfaaucaaucasusu | 11348 | usGfsaUfuGfaUfuGfaCfuUfaAfgUfususu |
| ETD02130 | 11339 | [ETL17]sacagaUfUfaUfUfuguucaacasusu | 11349 | usGfsuUfgAfaCfaAfaUfaAfuCfuGfususu |
| ETD02131 | 11340 | [ETL17]saacaCfuUfUfdAuAfaacugucasusu | 11350 | usGfsaCfaGfuUfuAfuAfaAfgUfgUfususu |
| ETD02132 | 11341 | [ETL17]saaagAfcuuAfcAfaacgggaasusu | 11351 | usUfscCfcGfuUfuGfuAfaGfuCfuUfususu |
| ETD02133 | 11342 | [ETL17]sauguAfGfucAfuugacacugasusu | 11352 | usCfsaGfuGfuCfaAfuGfaCfuAfcAfususu |
| ETD02134 | 11343 | [ETL17]sagucAfuuGfAfcAfcuggaauasusu | 11353 | usAfsuUfcCfaGfuGfuCfaAfuGfaCfususu |

TABLE 32
Example siRNA Base Sequences

| | SS | | AS | |
|---|---|---|---|---|
| | SEQ | | SEQ | |
| siRNA | ID | Sense Strand Base Sequence | ID | Antisense Strand Base Sequence |
| Name | NO: | (5′ to 3′) | NO: | (5′ to 3′) |
| ETD02125 | 11354 | UGACACUUCAUCCAAUAGAUU | 11384 | UCUAUUGGAUGAAGUGUCAUU |
| ETD02126 | 11355 | UUGAAUAAUUUCAAUGGCAUU | 11385 | UGCCAUUGAAAUUAUUCAAUU |
| ETD02127 | 11356 | UGAAUAAUUUCAAUGGCGAUU | 11386 | UCGCCAUUGAAAUUAUUCAUU |
| ETD02128 | 11357 | GAAUAAUUUCAAUGGCGUAUU | 11387 | UACGCCAUUGAAAUUAUUCUU |
| ETD02129 | 11358 | AACUUAAGUCAAUCAAUCAUU | 11388 | UGAUUGAUUGACUUAAGUUUU |
| ETD02130 | 11359 | ACAGAUUAUUUGUUCAACAUU | 11389 | UGUUGAACAAAUAAUCUGUUU |
| ETD02131 | 11360 | AACACUUUAUAAACUGUCAUU | 11390 | UGACAGUUUAUAAAGUGUUUU |
| ETD02132 | 11361 | AAAGACUUACAAACGGGAAUU | 11391 | UUCCCGUUUGUAAGUCUUUUU |
| ETD02133 | 11362 | AUGUAGUCAUUGACACUGAUU | 11392 | UCAGUGUCAAUGACUACAUUU |
| ETD02134 | 11363 | AGUCAUUGACACUGGAAUAUU | 11393 | UAUUCCAGUGUCAAUGACUUU |
| | SS | | AS | |
| | SEQ | | SEQ | |
| siRNA | ID | Sense Strand Base Sequence | ID | Antisense Strand Base Sequence |
| Name | NO: | (5′ to 3′), without 3′ overhang | NO: | (5′ to 3′), without 3′ overhang |
| ETD02125 | 11364 | UGACACUUCAUCCAAUAGA | 11394 | UCUAUUGGAUGAAGUGUCA |
| ETD02126 | 11365 | UUGAAUAAUUUCAAUGGCA | 11395 | UGCCAUUGAAAUUAUUCAA |
| ETD02127 | 11366 | UGAAUAAUUUCAAUGGCGA | 11396 | UCGCCAUUGAAAUUAUUCA |
| ETD02128 | 11367 | GAAUAAUUUCAAUGGCGUA | 11397 | UACGCCAUUGAAAUUAUUC |
| ETD02129 | 11368 | AACUUAAGUCAAUCAAUCA | 11398 | UGAUUGAUUGACUUAAGUU |
| ETD02130 | 11369 | ACAGAUUAUUUGUUCAACA | 11399 | UGUUGAACAAAUAAUCUGU |
| ETD02131 | 11370 | AACACUUUAUAAACUGUCA | 11400 | UGACAGUUUAUAAAGUGUU |
| ETD02132 | 11371 | AAAGACUUACAAACGGGAA | 11401 | UUCCCGUUUGUAAGUCUUU |
| ETD02133 | 11372 | AUGUAGUCAUUGACACUGA | 11402 | UCAGUGUCAAUGACUACAU |
| ETD02134 | 11373 | AGUCAUUGACACUGGAAUA | 11403 | UAUUCCAGUGUCAAUGACU |
| | SS | | AS | |
| | SEQ | Sense Strand Base Sequence | SEQ | Antisense Strand Base Sequence |
| siRNA | ID | (5′ to 3′), | ID | (5′ to 3′), without 3′ |
| Name | NO: | without 3′ overhang and 3′ A | NO: | overhang and 5′U |
| ETD02125 | 11374 | UGACACUUCAUCCAAUAG | 11404 | CUAUUGGAUGAAGUGUCA |
| ETD02126 | 11375 | UUGAAUAAUUUCAAUGGC | 11405 | GCCAUUGAAAUUAUUCAA |
| ETD02127 | 11376 | UGAAUAAUUUCAAUGGCG | 11406 | CGCCAUUGAAAUUAUUCA |
| ETD02128 | 11377 | GAAUAAUUUCAAUGGCGU | 11407 | ACGCCAUUGAAAUUAUUC |
| ETD02129 | 11378 | AACUUAAGUCAAUCAAUC | 11408 | GAUUGAUUGACUUAAGUU |
| ETD02130 | 11379 | ACAGAUUAUUUGUUCAAC | 11409 | GUUGAACAAAUAAUCUGU |
| ETD02131 | 11380 | AACACUUUAUAAACUGUC | 11410 | GACAGUUUAUAAAGUGUU |
| ETD02132 | 11381 | AAAGACUUACAAACGGGA | 11411 | UCCCGUUUGUAAGUCUUU |
| ETD02133 | 11382 | AUGUAGUCAUUGACACUG | 11412 | CAGUGUCAAUGACUACAU |
| ETD02134 | 11383 | AGUCAUUGACACUGGAAU | 11413 | AUUCCAGUGUCAAUGACU |

TABLE 33
Relative human SOS2 mRNA Levels in Livers of Mice

| | | | | Mean human SOS2 mRNA |
|---|---|---|---|---|
| | | | Dose | (Normalized to Group 2, |
| Group | n | Treatment | (ug) | Day 10) |
| 1 | 5 | Control | 0 | N/A |
| 2 | 5 | Control + AAV8 | 0 | 1.00 |
| 3 | 5 | ETD02125 | 100 | 0.30 |
| 4 | 5 | ETD02126 | 100 | 0.39 |
| 5 | 5 | ETD02127 | 100 | 0.36 |
| 6 | 5 | ETD02128 | 100 | 0.29 |
| 7 | 5 | ETD02129 | 100 | 0.41 |
| 8 | 5 | ETD02130 | 100 | 0.82 |
| 9 | 5 | ETD02131 | 100 | 0.76 |
| 10 | 5 | ETD02132 | 100 | 0.76 |
| 11 | 5 | ETD02133 | 100 | 0.54 |
| 12 | 5 | ETD02134 | 100 | 0.76 |

### IV. SEQUENCE INFORMATION

Some embodiments include one or more nucleic
acid sequences in the following tables:

| SEQ ID NO: | Description of Examples |
|---|---|
| 1-5490 | Sense strand sequences of SOS2 siRNAs |
| 5491-10980 | Antisense strand sequences of SOS2 siRNAs |
| 10981-11000 | Modified sense strand sequences of SOS2 siRNAs |
| 11001-11020 | Modified antisense strand sequences of SOS2 siRNAs |
| 11021-11090 | Modified sense strand sequences of SOS2 siRNAs |
| 11091-1115 | Modified sense strand sequences of SOS2 siRNAs |
| 11116-11140 | Modified antisense strand sequences of SOS2 siRNAs |
| 11141-11252 | Modified sense strand sequences of SOS2 siRNAs |
| 11253 | Full-length human SOS2 mRNA sequence (Ensembl |
| | Acc.# ENST00000216373.10) |
| 11254-11413 | Example sequences of SOS2 siRNAs |

| | SEQ | | | |
|---|---|---|---|---|
| | ID | sense strand sequence | SEQ ID | antisense strand sequence |
| Name | NO: | (5′-3′) | NO: | (5′-3′) |
| siRNA 1 | 1 | AGAAGCGGGCCAGCGCCGC | 5491 | GCGGCGCUGGCCCGCUUCU |
| siRNA 2 | 2 | GAAGCGGGCCAGCGCCGCC | 5492 | GGCGGCGCUGGCCCGCUUC |
| siRNA 3 | 3 | AAGCGGGCCAGCGCCGCCG | 5493 | CGGCGGCGCUGGCCCGCUU |
| siRNA 4 | 4 | AGCGGGCCAGCGCCGCCGG | 5494 | CCGGCGGCGCUGGCCCGCU |
| siRNA 5 | 5 | GCGGGCCAGCGCCGCCGGG | 5495 | CCCGGCGGCGCUGGCCCGC |
| siRNA 6 | 6 | CGGGCCAGCGCCGCCGGGA | 5496 | UCCCGGCGGCGCUGGCCCG |
| siRNA 7 | 7 | GGGCCAGCGCCGCCGGGAA | 5497 | UUCCCGGCGGCGCUGGCCC |
| siRNA 8 | 8 | GGCCAGCGCCGCCGGGAAA | 5498 | UUUCCCGGCGGCGCUGGCC |
| siRNA 9 | 9 | GCCAGCGCCGCCGGGAAAG | 5499 | CUUUCCCGGCGGCGCUGGC |
| siRNA 10 | 10 | CCAGCGCCGCCGGGAAAGG | 5500 | CCUUUCCCGGCGGCGCUGG |
| siRNA 11 | 11 | CAGCGCCGCCGGGAAAGGA | 5501 | UCCUUUCCCGGCGGCGCUG |
| siRNA 12 | 12 | AGCGCCGCCGGGAAAGGAG | 5502 | CUCCUUUCCCGGCGGCGCU |
| siRNA 13 | 13 | GCGCCGCCGGGAAAGGAGG | 5503 | CCUCCUUUCCCGGCGGCGC |
| siRNA 14 | 14 | CGCCGCCGGGAAAGGAGGU | 5504 | ACCUCCUUUCCCGGCGGCG |
| siRNA 15 | 15 | GCCGCCGGGAAAGGAGGUC | 5505 | GACCUCCUUUCCCGGCGGC |
| siRNA 16 | 16 | CCGCCGGGAAAGGAGGUCG | 5506 | CGACCUCCUUUCCCGGCGG |
| siRNA 17 | 17 | CGCCGGGAAAGGAGGUCGC | 5507 | GCGACCUCCUUUCCCGGCG |
| siRNA 18 | 18 | GCCGGGAAAGGAGGUCGCC | 5508 | GGCGACCUCCUUUCCCGGC |
| siRNA 19 | 19 | CCGGGAAAGGAGGUCGCCG | 5509 | CGGCGACCUCCUUUCCCGG |
| siRNA 20 | 20 | CGGGAAAGGAGGUCGCCGC | 5510 | GCGGCGACCUCCUUUCCCG |
| siRNA 21 | 21 | GGGAAAGGAGGUCGCCGCC | 5511 | GGCGGCGACCUCCUUUCCC |
| siRNA 22 | 22 | GGAAAGGAGGUCGCCGCCC | 5512 | GGGCGGCGACCUCCUUUCC |
| siRNA 23 | 23 | GAAAGGAGGUCGCCGCCCG | 5513 | CGGGCGGCGACCUCCUUUC |
| siRNA 24 | 24 | AAAGGAGGUCGCCGCCCGG | 5514 | CCGGGCGGCGACCUCCUUU |
| siRNA 25 | 25 | AAGGAGGUCGCCGCCCGGG | 5515 | CCCGGGCGGCGACCUCCUU |
| siRNA 26 | 26 | AGGAGGUCGCCGCCCGGGG | 5516 | CCCCGGGCGGCGACCUCCU |
| siRNA 27 | 27 | GGAGGUCGCCGCCCGGGGU | 5517 | ACCCCGGGCGGCGACCUCC |
| siRNA 28 | 28 | GAGGUCGCCGCCCGGGGUC | 5518 | GACCCCGGGCGGCGACCUC |
| siRNA 29 | 29 | AGGUCGCCGCCCGGGGUCG | 5519 | CGACCCCGGGCGGCGACCU |
| siRNA 30 | 30 | GGUCGCCGCCCGGGGUCGC | 5520 | GCGACCCCGGGCGGCGACC |
| siRNA 31 | 31 | GUCGCCGCCCGGGGUCGCC | 5521 | GGCGACCCCGGGCGGCGAC |
| siRNA 32 | 32 | UCGCCGCCCGGGGUCGCCC | 5522 | GGGCGACCCCGGGCGGCGA |
| siRNA 33 | 33 | CGCCGCCCGGGGUCGCCCG | 5523 | CGGGCGACCCCGGGCGGCG |
| siRNA 34 | 34 | GCCGCCCGGGGUCGCCCGG | 5524 | CCGGGCGACCCCGGGCGGC |
| siRNA 35 | 35 | CCGCCCGGGGUCGCCCGGG | 5525 | CCCGGGCGACCCCGGGCGG |
| siRNA 36 | 36 | CGCCCGGGGUCGCCCGGGC | 5526 | GCCCGGGCGACCCCGGGCG |
| siRNA 37 | 37 | GCCCGGGGUCGCCCGGGCU | 5527 | AGCCCGGGCGACCCCGGGC |
| siRNA 38 | 38 | CCCGGGGUCGCCCGGGCUU | 5528 | AAGCCCGGGCGACCCCGGG |
| siRNA 39 | 39 | CCGGGGUCGCCCGGGCUUG | 5529 | CAAGCCCGGGCGACCCCGG |
| siRNA 40 | 40 | CGGGGUCGCCCGGGCUUGC | 5530 | GCAAGCCCGGGCGACCCCG |
| siRNA 41 | 41 | GGGGUCGCCCGGGCUUGCG | 5531 | CGCAAGCCCGGGCGACCCC |
| siRNA 42 | 42 | GGGUCGCCCGGGCUUGCGG | 5532 | CCGCAAGCCCGGGCGACCC |
| siRNA 43 | 43 | GGUCGCCCGGGCUUGCGGG | 5533 | CCCGCAAGCCCGGGCGACC |
| siRNA 44 | 44 | GUCGCCCGGGCUUGCGGGU | 5534 | ACCCGCAAGCCCGGGCGAC |
| siRNA 45 | 45 | UCGCCCGGGCUUGCGGGUC | 5535 | GACCCGCAAGCCCGGGCGA |
| siRNA 46 | 46 | CGCCCGGGCUUGCGGGUCG | 5536 | CGACCCGCAAGCCCGGGCG |
| siRNA 47 | 47 | GCCCGGGCUUGCGGGUCGC | 5537 | GCGACCCGCAAGCCCGGGC |
| siRNA 48 | 48 | CCCGGGCUUGCGGGUCGCC | 5538 | GGCGACCCGCAAGCCCGGG |
| siRNA 49 | 49 | CCGGGCUUGCGGGUCGCCG | 5539 | CGGCGACCCGCAAGCCCGG |
| siRNA 50 | 50 | CGGGCUUGCGGGUCGCCGC | 5540 | GCGGCGACCCGCAAGCCCG |
| siRNA 51 | 51 | GGGCUUGCGGGUCGCCGCG | 5541 | CGCGGCGACCCGCAAGCCC |
| siRNA 52 | 52 | GGCUUGCGGGUCGCCGCGC | 5542 | GCGCGGCGACCCGCAAGCC |
| siRNA 53 | 53 | GCUUGCGGGUCGCCGCGCU | 5543 | AGCGCGGCGACCCGCAAGC |
| siRNA 54 | 54 | CUUGCGGGUCGCCGCGCUU | 5544 | AAGCGCGGCGACCCGCAAG |
| siRNA 55 | 55 | UUGCGGGUCGCCGCGCUUC | 5545 | GAAGCGCGGCGACCCGCAA |
| siRNA 56 | 56 | UGCGGGUCGCCGCGCUUCC | 5546 | GGAAGCGCGGCGACCCGCA |
| siRNA 57 | 57 | GCGGGUCGCCGCGCUUCCU | 5547 | AGGAAGCGCGGCGACCCGC |
| siRNA 58 | 58 | CGGGUCGCCGCGCUUCCUC | 5548 | GAGGAAGCGCGGCGACCCG |
| siRNA 59 | 59 | GGGUCGCCGCGCUUCCUCU | 5549 | AGAGGAAGCGCGGCGACCC |
| siRNA 60 | 60 | GGUCGCCGCGCUUCCUCUG | 5550 | CAGAGGAAGCGCGGCGACC |
| siRNA 61 | 61 | GUCGCCGCGCUUCCUCUGC | 5551 | GCAGAGGAAGCGCGGCGAC |
| siRNA 62 | 62 | UCGCCGCGCUUCCUCUGCG | 5552 | CGCAGAGGAAGCGCGGCGA |
| siRNA 63 | 63 | CGCCGCGCUUCCUCUGCGG | 5553 | CCGCAGAGGAAGCGCGGCG |
| siRNA 64 | 64 | GCCGCGCUUCCUCUGCGGG | 5554 | CCCGCAGAGGAAGCGCGGC |
| siRNA 65 | 65 | CCGCGCUUCCUCUGCGGGC | 5555 | GCCCGCAGAGGAAGCGCGG |
| siRNA 66 | 66 | CGCGCUUCCUCUGCGGGCG | 5556 | CGCCCGCAGAGGAAGCGCG |
| siRNA 67 | 67 | GCGCUUCCUCUGCGGGCGC | 5557 | GCGCCCGCAGAGGAAGCGC |
| siRNA 68 | 68 | CGCUUCCUCUGCGGGCGCU | 5558 | AGCGCCCGCAGAGGAAGCG |
| siRNA 69 | 69 | GCUUCCUCUGCGGGCGCUG | 5559 | CAGCGCCCGCAGAGGAAGC |
| siRNA 70 | 70 | CUUCCUCUGCGGGCGCUGC | 5560 | GCAGCGCCCGCAGAGGAAG |
| siRNA 71 | 71 | UUCCUCUGCGGGCGCUGCG | 5561 | CGCAGCGCCCGCAGAGGAA |
| siRNA 72 | 72 | UCCUCUGCGGGCGCUGCGG | 5562 | CCGCAGCGCCCGCAGAGGA |
| siRNA 73 | 73 | CCUCUGCGGGCGCUGCGGG | 5563 | CCCGCAGCGCCCGCAGAGG |
| siRNA 74 | 74 | CUCUGCGGGCGCUGCGGGA | 5564 | UCCCGCAGCGCCCGCAGAG |
| siRNA 75 | 75 | UCUGCGGGCGCUGCGGGAG | 5565 | CUCCCGCAGCGCCCGCAGA |
| siRNA 76 | 76 | CUGCGGGCGCUGCGGGAGG | 5566 | CCUCCCGCAGCGCCCGCAG |
| siRNA 77 | 77 | UGCGGGCGCUGCGGGAGGC | 5567 | GCCUCCCGCAGCGCCCGCA |
| siRNA 78 | 78 | GCGGGCGCUGCGGGAGGCG | 5568 | CGCCUCCCGCAGCGCCCGC |
| siRNA 79 | 79 | CGGGCGCUGCGGGAGGCGA | 5569 | UCGCCUCCCGCAGCGCCCG |
| siRNA 80 | 80 | GGGCGCUGCGGGAGGCGAG | 5570 | CUCGCCUCCCGCAGCGCCC |
| siRNA 81 | 81 | GGCGCUGCGGGAGGCGAGG | 5571 | CCUCGCCUCCCGCAGCGCC |
| siRNA 82 | 82 | GCGCUGCGGGAGGCGAGGG | 5572 | CCCUCGCCUCCCGCAGCGC |
| siRNA 83 | 83 | CGCUGCGGGAGGCGAGGGC | 5573 | GCCCUCGCCUCCCGCAGCG |
| siRNA 84 | 84 | GCUGCGGGAGGCGAGGGCC | 5574 | GGCCCUCGCCUCCCGCAGC |
| siRNA 85 | 85 | CUGCGGGAGGCGAGGGCCG | 5575 | CGGCCCUCGCCUCCCGCAG |
| siRNA 86 | 86 | UGCGGGAGGCGAGGGCCGC | 5576 | GCGGCCCUCGCCUCCCGCA |
| siRNA 87 | 87 | GCGGGAGGCGAGGGCCGCC | 5577 | GGCGGCCCUCGCCUCCCGC |
| siRNA 88 | 88 | CGGGAGGCGAGGGCCGCCU | 5578 | AGGCGGCCCUCGCCUCCCG |
| siRNA 89 | 89 | GGGAGGCGAGGGCCGCCUC | 5579 | GAGGCGGCCCUCGCCUCCC |
| siRNA 90 | 90 | GGAGGCGAGGGCCGCCUCG | 5580 | CGAGGCGGCCCUCGCCUCC |
| siRNA 91 | 91 | GAGGCGAGGGCCGCCUCGG | 5581 | CCGAGGCGGCCCUCGCCUC |
| siRNA 92 | 92 | AGGCGAGGGCCGCCUCGGC | 5582 | GCCGAGGCGGCCCUCGCCU |
| siRNA 93 | 93 | GGCGAGGGCCGCCUCGGCG | 5583 | CGCCGAGGCGGCCCUCGCC |
| siRNA 94 | 94 | GCGAGGGCCGCCUCGGCGG | 5584 | CCGCCGAGGCGGCCCUCGC |
| siRNA 95 | 95 | CGAGGGCCGCCUCGGCGGA | 5585 | UCCGCCGAGGCGGCCCUCG |
| siRNA 96 | 96 | GAGGGCCGCCUCGGCGGAG | 5586 | CUCCGCCGAGGCGGCCCUC |
| siRNA 97 | 97 | AGGGCCGCCUCGGCGGAGG | 5587 | CCUCCGCCGAGGCGGCCCU |
| siRNA 98 | 98 | GGGCCGCCUCGGCGGAGGA | 5588 | UCCUCCGCCGAGGCGGCCC |
| siRNA 99 | 99 | GGCCGCCUCGGCGGAGGAA | 5589 | UUCCUCCGCCGAGGCGGCC |
| siRNA 100 | 100 | GCCGCCUCGGCGGAGGAAG | 5590 | CUUCCUCCGCCGAGGCGGC |
| siRNA 101 | 101 | CCGCCUCGGCGGAGGAAGC | 5591 | GCUUCCUCCGCCGAGGCGG |
| siRNA 102 | 102 | CGCCUCGGCGGAGGAAGCC | 5592 | GGCUUCCUCCGCCGAGGCG |
| siRNA 103 | 103 | GCCUCGGCGGAGGAAGCCG | 5593 | CGGCUUCCUCCGCCGAGGC |
| siRNA 104 | 104 | CCUCGGCGGAGGAAGCCGA | 5594 | UCGGCUUCCUCCGCCGAGG |
| siRNA 105 | 105 | CUCGGCGGAGGAAGCCGAC | 5595 | GUCGGCUUCCUCCGCCGAG |
| siRNA 106 | 106 | UCGGCGGAGGAAGCCGACC | 5596 | GGUCGGCUUCCUCCGCCGA |
| siRNA 107 | 107 | CGGCGGAGGAAGCCGACCC | 5597 | GGGUCGGCUUCCUCCGCCG |
| siRNA 108 | 108 | GGCGGAGGAAGCCGACCCC | 5598 | GGGGUCGGCUUCCUCCGCC |
| siRNA 109 | 109 | GCGGAGGAAGCCGACCCCG | 5599 | CGGGGUCGGCUUCCUCCGC |
| siRNA 110 | 110 | CGGAGGAAGCCGACCCCGG | 5600 | CCGGGGUCGGCUUCCUCCG |
| siRNA 111 | 111 | GGAGGAAGCCGACCCCGGG | 5601 | CCCGGGGUCGGCUUCCUCC |
| siRNA 112 | 112 | GAGGAAGCCGACCCCGGGG | 5602 | CCCCGGGGUCGGCUUCCUC |
| siRNA 113 | 113 | AGGAAGCCGACCCCGGGGU | 5603 | ACCCCGGGGUCGGCUUCCU |
| siRNA 114 | 114 | GGAAGCCGACCCCGGGGUC | 5604 | GACCCCGGGGUCGGCUUCC |
| siRNA 115 | 115 | GAAGCCGACCCCGGGGUCU | 5605 | AGACCCCGGGGUCGGCUUC |
| siRNA 116 | 116 | AAGCCGACCCCGGGGUCUC | 5606 | GAGACCCCGGGGUCGGCUU |
| siRNA 117 | 117 | AGCCGACCCCGGGGUCUCC | 5607 | GGAGACCCCGGGGUCGGCU |
| siRNA 118 | 118 | GCCGACCCCGGGGUCUCCG | 5608 | CGGAGACCCCGGGGUCGGC |
| siRNA 119 | 119 | CCGACCCCGGGGUCUCCGC | 5609 | GCGGAGACCCCGGGGUCGG |
| siRNA 120 | 120 | CGACCCCGGGGUCUCCGCC | 5610 | GGCGGAGACCCCGGGGUCG |
| siRNA 121 | 121 | GACCCCGGGGUCUCCGCCA | 5611 | UGGCGGAGACCCCGGGGUC |
| siRNA 122 | 122 | ACCCCGGGGUCUCCGCCAG | 5612 | CUGGCGGAGACCCCGGGGU |
| siRNA 123 | 123 | CCCCGGGGUCUCCGCCAGC | 5613 | GCUGGCGGAGACCCCGGGG |
| siRNA 124 | 124 | CCCGGGGUCUCCGCCAGCC | 5614 | GGCUGGCGGAGACCCCGGG |
| siRNA 125 | 125 | CCGGGGUCUCCGCCAGCCC | 5615 | GGGCUGGCGGAGACCCCGG |
| siRNA 126 | 126 | CGGGGUCUCCGCCAGCCCG | 5616 | CGGGCUGGCGGAGACCCCG |
| siRNA 127 | 127 | GGGGUCUCCGCCAGCCCGC | 5617 | GCGGGCUGGCGGAGACCCC |
| siRNA 128 | 128 | GGGUCUCCGCCAGCCCGCC | 5618 | GGCGGGCUGGCGGAGACCC |
| siRNA 129 | 129 | GGUCUCCGCCAGCCCGCCG | 5619 | CGGCGGGCUGGCGGAGACC |
| siRNA 130 | 130 | GUCUCCGCCAGCCCGCCGG | 5620 | CCGGCGGGCUGGCGGAGAC |
| siRNA 131 | 131 | UCUCCGCCAGCCCGCCGGC | 5621 | GCCGGCGGGCUGGCGGAGA |
| siRNA 132 | 132 | CUCCGCCAGCCCGCCGGCG | 5622 | CGCCGGCGGGCUGGCGGAG |
| siRNA 133 | 133 | UCCGCCAGCCCGCCGGCGC | 5623 | GCGCCGGCGGGCUGGCGGA |
| siRNA 134 | 134 | CCGCCAGCCCGCCGGCGCC | 5624 | GGCGCCGGCGGGCUGGCGG |
| siRNA 135 | 135 | CGCCAGCCCGCCGGCGCCG | 5625 | CGGCGCCGGCGGGCUGGCG |
| siRNA 136 | 136 | GCCAGCCCGCCGGCGCCGC | 5626 | GCGGCGCCGGCGGGCUGGC |
| siRNA 137 | 137 | CCAGCCCGCCGGCGCCGCC | 5627 | GGCGGCGCCGGCGGGCUGG |
| siRNA 138 | 138 | CAGCCCGCCGGCGCCGCCU | 5628 | AGGCGGCGCCGGCGGGCUG |
| siRNA 139 | 139 | AGCCCGCCGGCGCCGCCUC | 5629 | GAGGCGGCGCCGGCGGGCU |
| siRNA 140 | 140 | GCCCGCCGGCGCCGCCUCC | 5630 | GGAGGCGGCGCCGGCGGGC |
| siRNA 141 | 141 | CCCGCCGGCGCCGCCUCCG | 5631 | CGGAGGCGGCGCCGGCGGG |
| siRNA 142 | 142 | CCGCCGGCGCCGCCUCCGA | 5632 | UCGGAGGCGGCGCCGGCGG |
| siRNA 143 | 143 | CGCCGGCGCCGCCUCCGAG | 5633 | CUCGGAGGCGGCGCCGGCG |
| siRNA 144 | 144 | GCCGGCGCCGCCUCCGAGC | 5634 | GCUCGGAGGCGGCGCCGGC |
| siRNA 145 | 145 | CCGGCGCCGCCUCCGAGCC | 5635 | GGCUCGGAGGCGGCGCCGG |
| siRNA 146 | 146 | CGGCGCCGCCUCCGAGCCG | 5636 | CGGCUCGGAGGCGGCGCCG |
| siRNA 147 | 147 | GGCGCCGCCUCCGAGCCGC | 5637 | GCGGCUCGGAGGCGGCGCC |
| siRNA 148 | 148 | GCGCCGCCUCCGAGCCGCC | 5638 | GGCGGCUCGGAGGCGGCGC |
| siRNA 149 | 149 | CGCCGCCUCCGAGCCGCCU | 5639 | AGGCGGCUCGGAGGCGGCG |
| siRNA 150 | 150 | GCCGCCUCCGAGCCGCCUC | 5640 | GAGGCGGCUCGGAGGCGGC |
| siRNA 151 | 151 | CCGCCUCCGAGCCGCCUCG | 5641 | CGAGGCGGCUCGGAGGCGG |
| siRNA 152 | 152 | CGCCUCCGAGCCGCCUCGG | 5642 | CCGAGGCGGCUCGGAGGCG |
| siRNA 153 | 153 | GCCUCCGAGCCGCCUCGGC | 5643 | GCCGAGGCGGCUCGGAGGC |
| siRNA 154 | 154 | CCUCCGAGCCGCCUCGGCC | 5644 | GGCCGAGGCGGCUCGGAGG |
| siRNA 155 | 155 | CUCCGAGCCGCCUCGGCCG | 5645 | CGGCCGAGGCGGCUCGGAG |
| siRNA 156 | 156 | UCCGAGCCGCCUCGGCCGU | 5646 | ACGGCCGAGGCGGCUCGGA |
| siRNA 157 | 157 | CCGAGCCGCCUCGGCCGUA | 5647 | UACGGCCGAGGCGGCUCGG |
| siRNA 158 | 158 | CGAGCCGCCUCGGCCGUAG | 5648 | CUACGGCCGAGGCGGCUCG |
| siRNA 159 | 159 | GAGCCGCCUCGGCCGUAGC | 5649 | GCUACGGCCGAGGCGGCUC |
| siRNA 160 | 160 | AGCCGCCUCGGCCGUAGCC | 5650 | GGCUACGGCCGAGGCGGCU |
| siRNA 161 | 161 | GCCGCCUCGGCCGUAGCCU | 5651 | AGGCUACGGCCGAGGCGGC |
| siRNA 162 | 162 | CCGCCUCGGCCGUAGCCUC | 5652 | GAGGCUACGGCCGAGGCGG |
| siRNA 163 | 163 | CGCCUCGGCCGUAGCCUCG | 5653 | CGAGGCUACGGCCGAGGCG |
| siRNA 164 | 164 | GCCUCGGCCGUAGCCUCGG | 5654 | CCGAGGCUACGGCCGAGGC |
| siRNA 165 | 165 | CCUCGGCCGUAGCCUCGGC | 5655 | GCCGAGGCUACGGCCGAGG |
| siRNA 166 | 166 | CUCGGCCGUAGCCUCGGCC | 5656 | GGCCGAGGCUACGGCCGAG |
| siRNA 167 | 167 | UCGGCCGUAGCCUCGGCCC | 5657 | GGGCCGAGGCUACGGCCGA |
| siRNA 168 | 168 | CGGCCGUAGCCUCGGCCCG | 5658 | CGGGCCGAGGCUACGGCCG |
| siRNA 169 | 169 | GGCCGUAGCCUCGGCCCGG | 5659 | CCGGGCCGAGGCUACGGCC |
| siRNA 170 | 170 | GCCGUAGCCUCGGCCCGGG | 5660 | CCCGGGCCGAGGCUACGGC |
| siRNA 171 | 171 | CCGUAGCCUCGGCCCGGGC | 5661 | GCCCGGGCCGAGGCUACGG |
| siRNA 172 | 172 | CGUAGCCUCGGCCCGGGCG | 5662 | CGCCCGGGCCGAGGCUACG |
| siRNA 173 | 173 | GUAGCCUCGGCCCGGGCGG | 5663 | CCGCCCGGGCCGAGGCUAC |
| siRNA 174 | 174 | UAGCCUCGGCCCGGGGGG | 5664 | CCCGCCCGGGCCGAGGCUA |
| siRNA 175 | 175 | AGCCUCGGCCCGGGCGGGA | 5665 | UCCCGCCCGGGCCGAGGCU |
| siRNA 176 | 176 | GCCUCGGCCCGGGCGGGAG | 5666 | CUCCCGCCCGGGCCGAGGC |
| siRNA 177 | 177 | CCUCGGCCCGGGCGGGAGG | 5667 | CCUCCCGCCCGGGCCGAGG |
| siRNA 178 | 178 | CUCGGCCCGGGCGGGAGGC | 5668 | GCCUCCCGCCCGGGCCGAG |
| siRNA 179 | 179 | UCGGCCCGGGCGGGAGGCG | 5669 | CGCCUCCCGCCCGGGCCGA |
| siRNA 180 | 180 | CGGCCCGGGCGGGAGGCGG | 5670 | CCGCCUCCCGCCCGGGCCG |
| siRNA 181 | 181 | GGCCCGGGCGGGAGGCGGC | 5671 | GCCGCCUCCCGCCCGGGCC |
| siRNA 182 | 182 | GCCCGGGCGGGAGGCGGCG | 5672 | CGCCGCCUCCCGCCCGGGC |
| siRNA 183 | 183 | CCCGGGCGGGAGGCGGCGG | 5673 | CCGCCGCCUCCCGCCCGGG |
| siRNA 184 | 184 | CCGGGCGGGAGGCGGCGGC | 5674 | GCCGCCGCCUCCCGCCCGG |
| siRNA 185 | 185 | CGGGCGGGAGGCGGCGGCC | 5675 | GGCCGCCGCCUCCCGCCCG |
| siRNA 186 | 186 | GGGCGGGAGGCGGCGGCCG | 5676 | CGGCCGCCGCCUCCCGCCC |
| siRNA 187 | 187 | GGCGGGAGGCGGCGGCCGC | 5677 | GCGGCCGCCGCCUCCCGCC |
| siRNA 188 | 188 | GCGGGAGGCGGCGGCCGCC | 5678 | GGCGGCCGCCGCCUCCCGC |
| siRNA 189 | 189 | CGGGAGGCGGCGGCCGCCG | 5679 | CGGCGGCCGCCGCCUCCCG |
| siRNA 190 | 190 | GGGAGGCGGCGGCCGCCGG | 5680 | CCGGCGGCCGCCGCCUCCC |
| siRNA 191 | 191 | GGAGGCGGCGGCCGCCGGC | 5681 | GCCGGCGGCCGCCGCCUCC |
| siRNA 192 | 192 | GAGGCGGCGGCCGCCGGCG | 5682 | CGCCGGCGGCCGCCGCCUC |
| siRNA 193 | 193 | AGGCGGCGGCCGCCGGCGA | 5683 | UCGCCGGCGGCCGCCGCCU |
| siRNA 194 | 194 | GGCGGCGGCCGCCGGCGAG | 5684 | CUCGCCGGCGGCCGCCGCC |
| siRNA 195 | 195 | GCGGCGGCCGCCGGCGAGG | 5685 | CCUCGCCGGCGGCCGCCGC |
| siRNA 196 | 196 | CGGCGGCCGCCGGCGAGGC | 5686 | GCCUCGCCGGCGGCCGCCG |
| siRNA 197 | 197 | GGCGGCCGCCGGCGAGGCG | 5687 | CGCCUCGCCGGCGGCCGCC |
| siRNA 198 | 198 | GCGGCCGCCGGCGAGGCGA | 5688 | UCGCCUCGCCGGCGGCCGC |
| siRNA 199 | 199 | CGGCCGCCGGCGAGGCGAG | 5689 | CUCGCCUCGCCGGCGGCCG |
| siRNA 200 | 200 | GGCCGCCGGCGAGGCGAGG | 5690 | CCUCGCCUCGCCGGCGGCC |
| siRNA 201 | 201 | GCCGCCGGCGAGGCGAGGC | 5691 | GCCUCGCCUCGCCGGCGGC |
| siRNA 202 | 202 | CCGCCGGCGAGGCGAGGCG | 5692 | CGCCUCGCCUCGCCGGCGG |
| siRNA 203 | 203 | CGCCGGCGAGGCGAGGCGG | 5693 | CCGCCUCGCCUCGCCGGCG |
| siRNA 204 | 204 | GCCGGCGAGGCGAGGCGGC | 5694 | GCCGCCUCGCCUCGCCGGC |
| siRNA 205 | 205 | CCGGCGAGGCGAGGCGGCC | 5695 | GGCCGCCUCGCCUCGCCGG |
| siRNA 206 | 206 | CGGCGAGGCGAGGCGGCCC | 5696 | GGGCCGCCUCGCCUCGCCG |
| siRNA 207 | 207 | GGCGAGGCGAGGCGGCCCG | 5697 | CGGGCCGCCUCGCCUCGCC |
| siRNA 208 | 208 | GCGAGGCGAGGCGGCCCGC | 5698 | GCGGGCCGCCUCGCCUCGC |
| siRNA 209 | 209 | CGAGGCGAGGCGGCCCGCG | 5699 | CGCGGGCCGCCUCGCCUCG |
| siRNA 210 | 210 | GAGGCGAGGCGGCCCGCGC | 5700 | GCGCGGGCCGCCUCGCCUC |
| siRNA 211 | 211 | AGGCGAGGCGGCCCGCGCC | 5701 | GGCGCGGGCCGCCUCGCCU |
| siRNA 212 | 212 | GGCGAGGCGGCCCGCGCCC | 5702 | GGGCGCGGGCCGCCUCGCC |
| siRNA 213 | 213 | GCGAGGCGGCCCGCGCCCU | 5703 | AGGGCGCGGGCCGCCUCGC |
| siRNA 214 | 214 | CGAGGCGGCCCGCGCCCUG | 5704 | CAGGGCGCGGGCCGCCUCG |
| siRNA 215 | 215 | GAGGCGGCCCGCGCCCUGC | 5705 | GCAGGGCGCGGGCCGCCUC |
| siRNA 216 | 216 | AGGCGGCCCGCGCCCUGCC | 5706 | GGCAGGGCGCGGGCCGCCU |
| siRNA 217 | 217 | GGCGGCCCGCGCCCUGCCU | 5707 | AGGCAGGGCGCGGGCCGCC |
| siRNA 218 | 218 | GCGGCCCGCGCCCUGCCUG | 5708 | CAGGCAGGGCGCGGGCCGC |
| siRNA 219 | 219 | CGGCCCGCGCCCUGCCUGU | 5709 | ACAGGCAGGGCGCGGGCCG |
| siRNA 220 | 220 | GGCCCGCGCCCUGCCUGUC | 5710 | GACAGGCAGGGCGCGGGCC |
| siRNA 221 | 221 | GCCCGCGCCCUGCCUGUCA | 5711 | UGACAGGCAGGGCGCGGGC |
| siRNA 222 | 222 | CCCGCGCCCUGCCUGUCAG | 5712 | CUGACAGGCAGGGCGCGGG |
| siRNA 223 | 223 | CCGCGCCCUGCCUGUCAGG | 5713 | CCUGACAGGCAGGGCGCGG |
| siRNA 224 | 224 | CGCGCCCUGCCUGUCAGGC | 5714 | GCCUGACAGGCAGGGCGCG |
| siRNA 225 | 225 | GCGCCCUGCCUGUCAGGCC | 5715 | GGCCUGACAGGCAGGGCGC |
| siRNA 226 | 226 | CGCCCUGCCUGUCAGGCCA | 5716 | UGGCCUGACAGGCAGGGCG |
| siRNA 227 | 227 | GCCCUGCCUGUCAGGCCAC | 5717 | GUGGCCUGACAGGCAGGGC |
| siRNA 228 | 228 | CCCUGCCUGUCAGGCCACC | 5718 | GGUGGCCUGACAGGCAGGG |
| siRNA 229 | 229 | CCUGCCUGUCAGGCCACCG | 5719 | CGGUGGCCUGACAGGCAGG |
| siRNA 230 | 230 | CUGCCUGUCAGGCCACCGG | 5720 | CCGGUGGCCUGACAGGCAG |
| siRNA 231 | 231 | UGCCUGUCAGGCCACCGGC | 5721 | GCCGGUGGCCUGACAGGCA |
| siRNA 232 | 232 | GCCUGUCAGGCCACCGGCC | 5722 | GGCCGGUGGCCUGACAGGC |
| siRNA 233 | 233 | CCUGUCAGGCCACCGGCCC | 5723 | GGGCCGGUGGCCUGACAGG |
| siRNA 234 | 234 | CUGUCAGGCCACCGGCCCG | 5724 | CGGGCCGGUGGCCUGACAG |
| siRNA 235 | 235 | UGUCAGGCCACCGGCCCGG | 5725 | CCGGGCCGGUGGCCUGACA |
| siRNA 236 | 236 | GUCAGGCCACCGGCCCGGC | 5726 | GCCGGGCCGGUGGCCUGAC |
| siRNA 237 | 237 | UCAGGCCACCGGCCCGGCC | 5727 | GGCCGGGCCGGUGGCCUGA |
| siRNA 238 | 238 | CAGGCCACCGGCCCGGCCC | 5728 | GGGCCGGGCCGGUGGCCUG |
| siRNA 239 | 239 | AGGCCACCGGCCCGGCCCG | 5729 | CGGGCCGGGCCGGUGGCCU |
| siRNA 240 | 240 | GGCCACCGGCCCGGCCCGC | 5730 | GCGGGCCGGGCCGGUGGCC |
| siRNA 241 | 241 | GCCACCGGCCCGGCCCGCG | 5731 | CGCGGGCCGGGCCGGUGGC |
| siRNA 242 | 242 | CCACCGGCCCGGCCCGCGG | 5732 | CCGCGGGCCGGGCCGGUGG |
| siRNA 243 | 243 | CACCGGCCCGGCCCGCGGG | 5733 | CCCGCGGGCCGGGCCGGUG |
| siRNA 244 | 244 | ACCGGCCCGGCCCGCGGGC | 5734 | GCCCGCGGGCCGGGCCGGU |
| siRNA 245 | 245 | CCGGCCCGGCCCGCGGGCU | 5735 | AGCCCGCGGGCCGGGCCGG |
| siRNA 246 | 246 | CGGCCCGGCCCGCGGGCUG | 5736 | CAGCCCGCGGGCCGGGCCG |
| siRNA 247 | 247 | GGCCCGGCCCGCGGGCUGC | 5737 | GCAGCCCGCGGGCCGGGCC |
| siRNA 248 | 248 | GCCCGGCCCGCGGGCUGCC | 5738 | GGCAGCCCGCGGGCCGGGC |
| siRNA 249 | 249 | CCCGGCCCGCGGGCUGCCC | 5739 | GGGCAGCCCGCGGGCCGGG |
| siRNA 250 | 250 | CCGGCCCGCGGGCUGCCCC | 5740 | GGGGCAGCCCGCGGGCCGG |
| siRNA 251 | 251 | CGGCCCGCGGGCUGCCCCC | 5741 | GGGGGCAGCCCGCGGGCCG |
| siRNA 252 | 252 | GGCCCGCGGGCUGCCCCCG | 5742 | CGGGGGCAGCCCGCGGGCC |
| siRNA 253 | 253 | GCCCGCGGGCUGCCCCCGA | 5743 | UCGGGGGCAGCCCGCGGGC |
| siRNA 254 | 254 | CCCGCGGGCUGCCCCCGAU | 5744 | AUCGGGGGCAGCCCGCGGG |
| siRNA 255 | 255 | CCGCGGGCUGCCCCCGAUG | 5745 | CAUCGGGGGCAGCCCGCGG |
| siRNA 256 | 256 | CGCGGGCUGCCCCCGAUGC | 5746 | GCAUCGGGGGCAGCCCGCG |
| siRNA 257 | 257 | GCGGGCUGCCCCCGAUGCG | 5747 | CGCAUCGGGGGCAGCCCGC |
| siRNA 258 | 258 | CGGGCUGCCCCCGAUGCGG | 5748 | CCGCAUCGGGGGCAGCCCG |
| siRNA 259 | 259 | GGGCUGCCCCCGAUGCGGA | 5749 | UCCGCAUCGGGGGCAGCCC |
| siRNA 260 | 260 | GGCUGCCCCCGAUGCGGAG | 5750 | CUCCGCAUCGGGGGCAGCC |
| siRNA 261 | 261 | GCUGCCCCCGAUGCGGAGG | 5751 | CCUCCGCAUCGGGGGCAGC |
| siRNA 262 | 262 | CUGCCCCCGAUGCGGAGGC | 5752 | GCCUCCGCAUCGGGGGCAG |
| siRNA 263 | 263 | UGCCCCCGAUGCGGAGGCG | 5753 | CGCCUCCGCAUCGGGGGCA |
| siRNA 264 | 264 | GCCCCCGAUGCGGAGGCGC | 5754 | GCGCCUCCGCAUCGGGGGC |
| siRNA 265 | 265 | CCCCCGAUGCGGAGGCGCU | 5755 | AGCGCCUCCGCAUCGGGGG |
| siRNA 266 | 266 | CCCCGAUGCGGAGGCGCUG | 5756 | CAGCGCCUCCGCAUCGGGG |
| siRNA 267 | 267 | CCCGAUGCGGAGGCGCUGU | 5757 | ACAGCGCCUCCGCAUCGGG |
| siRNA 268 | 268 | CCGAUGCGGAGGCGCUGUC | 5758 | GACAGCGCCUCCGCAUCGG |
| siRNA 269 | 269 | CGAUGCGGAGGCGCUGUCG | 5759 | CGACAGCGCCUCCGCAUCG |
| siRNA 270 | 270 | GAUGCGGAGGCGCUGUCGC | 5760 | GCGACAGCGCCUCCGCAUC |
| siRNA 271 | 271 | AUGCGGAGGCGCUGUCGCC | 5761 | GGCGACAGCGCCUCCGCAU |
| siRNA 272 | 272 | UGCGGAGGCGCUGUCGCCG | 5762 | CGGCGACAGCGCCUCCGCA |
| siRNA 273 | 273 | GCGGAGGCGCUGUCGCCGG | 5763 | CCGGCGACAGCGCCUCCGC |
| siRNA 274 | 274 | CGGAGGCGCUGUCGCCGGG | 5764 | CCCGGCGACAGCGCCUCCG |
| siRNA 275 | 275 | GGAGGCGCUGUCGCCGGGG | 5765 | CCCCGGCGACAGCGCCUCC |
| siRNA 276 | 276 | GAGGCGCUGUCGCCGGGGC | 5766 | GCCCCGGCGACAGCGCCUC |
| siRNA 277 | 277 | AGGCGCUGUCGCCGGGGCC | 5767 | GGCCCCGGCGACAGCGCCU |
| siRNA 278 | 278 | GGCGCUGUCGCCGGGGCCA | 5768 | UGGCCCCGGCGACAGCGCC |
| siRNA 279 | 279 | GCGCUGUCGCCGGGGCCAU | 5769 | AUGGCCCCGGCGACAGCGC |
| siRNA 280 | 280 | CGCUGUCGCCGGGGCCAUG | 5770 | CAUGGCCCCGGCGACAGCG |
| siRNA 281 | 281 | GCUGUCGCCGGGGCCAUGC | 5771 | GCAUGGCCCCGGCGACAGC |
| siRNA 282 | 282 | CUGUCGCCGGGGCCAUGCA | 5772 | UGCAUGGCCCCGGCGACAG |
| siRNA 283 | 283 | UGUCGCCGGGGCCAUGCAG | 5773 | CUGCAUGGCCCCGGCGACA |
| siRNA 284 | 284 | GUCGCCGGGGCCAUGCAGC | 5774 | GCUGCAUGGCCCCGGCGAC |
| siRNA 285 | 285 | UCGCCGGGGCCAUGCAGCA | 5775 | UGCUGCAUGGCCCCGGCGA |
| siRNA 286 | 286 | CGCCGGGGCCAUGCAGCAG | 5776 | CUGCUGCAUGGCCCCGGCG |
| siRNA 287 | 287 | GCCGGGGCCAUGCAGCAGG | 5777 | CCUGCUGCAUGGCCCCGGC |
| siRNA 288 | 288 | CCGGGGCCAUGCAGCAGGC | 5778 | GCCUGCUGCAUGGCCCCGG |
| siRNA 289 | 289 | CGGGGCCAUGCAGCAGGCG | 5779 | CGCCUGCUGCAUGGCCCCG |
| siRNA 290 | 290 | GGGGCCAUGCAGCAGGCGC | 5780 | GCGCCUGCUGCAUGGCCCC |
| siRNA 291 | 291 | GGGCCAUGCAGCAGGCGCC | 5781 | GGCGCCUGCUGCAUGGCCC |
| siRNA 292 | 292 | GGCCAUGCAGCAGGCGCCG | 5782 | CGGCGCCUGCUGCAUGGCC |
| siRNA 293 | 293 | GCCAUGCAGCAGGCGCCGC | 5783 | GCGGCGCCUGCUGCAUGGC |
| siRNA 294 | 294 | CCAUGCAGCAGGCGCCGCA | 5784 | UGCGGCGCCUGCUGCAUGG |
| siRNA 295 | 295 | CAUGCAGCAGGCGCCGCAG | 5785 | CUGCGGCGCCUGCUGCAUG |
| siRNA 296 | 296 | AUGCAGCAGGCGCCGCAGC | 5786 | GCUGCGGCGCCUGCUGCAU |
| siRNA 297 | 297 | UGCAGCAGGCGCCGCAGCC | 5787 | GGCUGCGGCGCCUGCUGCA |
| siRNA 298 | 298 | GCAGCAGGCGCCGCAGCCU | 5788 | AGGCUGCGGCGCCUGCUGC |
| siRNA 299 | 299 | CAGCAGGCGCCGCAGCCUU | 5789 | AAGGCUGCGGCGCCUGCUG |
| siRNA 300 | 300 | AGCAGGCGCCGCAGCCUUA | 5790 | UAAGGCUGCGGCGCCUGCU |
| siRNA 301 | 301 | GCAGGCGCCGCAGCCUUAC | 5791 | GUAAGGCUGCGGCGCCUGC |
| siRNA 302 | 302 | CAGGCGCCGCAGCCUUACG | 5792 | CGUAAGGCUGCGGCGCCUG |
| siRNA 303 | 303 | AGGCGCCGCAGCCUUACGA | 5793 | UCGUAAGGCUGCGGCGCCU |
| siRNA 304 | 304 | GGCGCCGCAGCCUUACGAG | 5794 | CUCGUAAGGCUGCGGCGCC |
| siRNA 305 | 305 | GCGCCGCAGCCUUACGAGU | 5795 | ACUCGUAAGGCUGCGGCGC |
| siRNA 306 | 306 | CGCCGCAGCCUUACGAGUU | 5796 | AACUCGUAAGGCUGCGGCG |
| siRNA 307 | 307 | GCCGCAGCCUUACGAGUUC | 5797 | GAACUCGUAAGGCUGCGGC |
| siRNA 308 | 308 | CCGCAGCCUUACGAGUUCU | 5798 | AGAACUCGUAAGGCUGCGG |
| siRNA 309 | 309 | CGCAGCCUUACGAGUUCUU | 5799 | AAGAACUCGUAAGGCUGCG |
| siRNA 310 | 310 | GCAGCCUUACGAGUUCUUC | 5800 | GAAGAACUCGUAAGGCUGC |
| siRNA 311 | 311 | CAGCCUUACGAGUUCUUCA | 5801 | UGAAGAACUCGUAAGGCUG |
| siRNA 312 | 312 | AGCCUUACGAGUUCUUCAG | 5802 | CUGAAGAACUCGUAAGGCU |
| siRNA 313 | 313 | GCCUUACGAGUUCUUCAGC | 5803 | GCUGAAGAACUCGUAAGGC |
| siRNA 314 | 314 | CCUUACGAGUUCUUCAGCG | 5804 | CGCUGAAGAACUCGUAAGG |
| siRNA 315 | 315 | CUUACGAGUUCUUCAGCGA | 5805 | UCGCUGAAGAACUCGUAAG |
| siRNA 316 | 316 | UUACGAGUUCUUCAGCGAG | 5806 | CUCGCUGAAGAACUCGUAA |
| siRNA 317 | 317 | UACGAGUUCUUCAGCGAGG | 5807 | CCUCGCUGAAGAACUCGUA |
| siRNA 318 | 318 | ACGAGUUCUUCAGCGAGGA | 5808 | UCCUCGCUGAAGAACUCGU |
| siRNA 319 | 319 | CGAGUUCUUCAGCGAGGAG | 5809 | CUCCUCGCUGAAGAACUCG |
| siRNA 320 | 320 | GAGUUCUUCAGCGAGGAGA | 5810 | UCUCCUCGCUGAAGAACUC |
| siRNA 321 | 321 | AGUUCUUCAGCGAGGAGAA | 5811 | UUCUCCUCGCUGAAGAACU |
| siRNA 322 | 322 | GUUCUUCAGCGAGGAGAAC | 5812 | GUUCUCCUCGCUGAAGAAC |
| siRNA 323 | 323 | UUCUUCAGCGAGGAGAACA | 5813 | UGUUCUCCUCGCUGAAGAA |
| siRNA 324 | 324 | UCUUCAGCGAGGAGAACAG | 5814 | CUGUUCUCCUCGCUGAAGA |
| siRNA 325 | 325 | CUUCAGCGAGGAGAACAGU | 5815 | ACUGUUCUCCUCGCUGAAG |
| siRNA 326 | 326 | UUCAGCGAGGAGAACAGUC | 5816 | GACUGUUCUCCUCGCUGAA |
| siRNA 327 | 327 | UCAGCGAGGAGAACAGUCC | 5817 | GGACUGUUCUCCUCGCUGA |
| siRNA 328 | 328 | CAGCGAGGAGAACAGUCCG | 5818 | CGGACUGUUCUCCUCGCUG |
| siRNA 329 | 329 | AGCGAGGAGAACAGUCCGA | 5819 | UCGGACUGUUCUCCUCGCU |
| siRNA 330 | 330 | GCGAGGAGAACAGUCCGAA | 5820 | UUCGGACUGUUCUCCUCGC |
| siRNA 331 | 331 | CGAGGAGAACAGUCCGAAA | 5821 | UUUCGGACUGUUCUCCUCG |
| siRNA 332 | 332 | GAGGAGAACAGUCCGAAAU | 5822 | AUUUCGGACUGUUCUCCUC |
| siRNA 333 | 333 | AGGAGAACAGUCCGAAAUG | 5823 | CAUUUCGGACUGUUCUCCU |
| siRNA 334 | 334 | GGAGAACAGUCCGAAAUGG | 5824 | CCAUUUCGGACUGUUCUCC |
| siRNA 335 | 335 | GAGAACAGUCCGAAAUGGC | 5825 | GCCAUUUCGGACUGUUCUC |
| siRNA 336 | 336 | AGAACAGUCCGAAAUGGCG | 5826 | CGCCAUUUCGGACUGUUCU |
| siRNA 337 | 337 | GAACAGUCCGAAAUGGCGG | 5827 | CCGCCAUUUCGGACUGUUC |
| siRNA 338 | 338 | AACAGUCCGAAAUGGCGGG | 5828 | CCCGCCAUUUCGGACUGUU |
| siRNA 339 | 339 | ACAGUCCGAAAUGGCGGGG | 5829 | CCCCGCCAUUUCGGACUGU |
| siRNA 340 | 340 | CAGUCCGAAAUGGCGGGGA | 5830 | UCCCCGCCAUUUCGGACUG |
| siRNA 341 | 341 | AGUCCGAAAUGGCGGGGAC | 5831 | GUCCCCGCCAUUUCGGACU |
| siRNA 342 | 342 | GUCCGAAAUGGCGGGGACU | 5832 | AGUCCCCGCCAUUUCGGAC |
| siRNA 343 | 343 | UCCGAAAUGGCGGGGACUG | 5833 | CAGUCCCCGCCAUUUCGGA |
| siRNA 344 | 344 | CCGAAAUGGCGGGGACUGU | 5834 | ACAGUCCCCGCCAUUUCGG |
| siRNA 345 | 345 | CGAAAUGGCGGGGACUGUU | 5835 | AACAGUCCCCGCCAUUUCG |
| siRNA 346 | 346 | GAAAUGGCGGGGACUGUUG | 5836 | CAACAGUCCCCGCCAUUUC |
| siRNA 347 | 347 | AAAUGGCGGGGACUGUUGG | 5837 | CCAACAGUCCCCGCCAUUU |
| siRNA 348 | 348 | AAUGGCGGGGACUGUUGGU | 5838 | ACCAACAGUCCCCGCCAUU |
| siRNA 349 | 349 | AUGGCGGGGACUGUUGGUC | 5839 | GACCAACAGUCCCCGCCAU |
| siRNA 350 | 350 | UGGCGGGGACUGUUGGUCU | 5840 | AGACCAACAGUCCCCGCCA |
| siRNA 351 | 351 | GGCGGGGACUGUUGGUCUC | 5841 | GAGACCAACAGUCCCCGCC |
| siRNA 352 | 352 | GCGGGGACUGUUGGUCUCG | 5842 | CGAGACCAACAGUCCCCGC |
| siRNA 353 | 353 | CGGGGACUGUUGGUCUCGG | 5843 | CCGAGACCAACAGUCCCCG |
| siRNA 354 | 354 | GGGGACUGUUGGUCUCGGC | 5844 | GCCGAGACCAACAGUCCCC |
| siRNA 355 | 355 | GGGACUGUUGGUCUCGGCC | 5845 | GGCCGAGACCAACAGUCCC |
| siRNA 356 | 356 | GGACUGUUGGUCUCGGCCC | 5846 | GGGCCGAGACCAACAGUCC |
| siRNA 357 | 357 | GACUGUUGGUCUCGGCCCU | 5847 | AGGGCCGAGACCAACAGUC |
| siRNA 358 | 358 | ACUGUUGGUCUCGGCCCUG | 5848 | CAGGGCCGAGACCAACAGU |
| siRNA 359 | 359 | CUGUUGGUCUCGGCCCUGC | 5849 | GCAGGGCCGAGACCAACAG |
| siRNA 360 | 360 | UGUUGGUCUCGGCCCUGCG | 5850 | CGCAGGGCCGAGACCAACA |
| siRNA 361 | 361 | GUUGGUCUCGGCCCUGCGG | 5851 | CCGCAGGGCCGAGACCAAC |
| siRNA 362 | 362 | UUGGUCUCGGCCCUGCGGA | 5852 | UCCGCAGGGCCGAGACCAA |
| siRNA 363 | 363 | UGGUCUCGGCCCUGCGGAA | 5853 | UUCCGCAGGGCCGAGACCA |
| siRNA 364 | 364 | GGUCUCGGCCCUGCGGAAG | 5854 | CUUCCGCAGGGCCGAGACC |
| siRNA 365 | 365 | GUCUCGGCCCUGCGGAAGG | 5855 | CCUUCCGCAGGGCCGAGAC |
| siRNA 366 | 366 | UCUCGGCCCUGCGGAAGGU | 5856 | ACCUUCCGCAGGGCCGAGA |
| siRNA 367 | 367 | CUCGGCCCUGCGGAAGGUU | 5857 | AACCUUCCGCAGGGCCGAG |
| siRNA 368 | 368 | UCGGCCCUGCGGAAGGUUC | 5858 | GAACCUUCCGCAGGGCCGA |
| siRNA 369 | 369 | CGGCCCUGCGGAAGGUUCA | 5859 | UGAACCUUCCGCAGGGCCG |
| siRNA 370 | 370 | GGCCCUGCGGAAGGUUCAG | 5860 | CUGAACCUUCCGCAGGGCC |
| siRNA 371 | 371 | GCCCUGCGGAAGGUUCAGG | 5861 | CCUGAACCUUCCGCAGGGC |
| siRNA 372 | 372 | CCCUGCGGAAGGUUCAGGA | 5862 | UCCUGAACCUUCCGCAGGG |
| siRNA 373 | 373 | CCUGCGGAAGGUUCAGGAA | 5863 | UUCCUGAACCUUCCGCAGG |
| siRNA 374 | 374 | CUGCGGAAGGUUCAGGAAC | 5864 | GUUCCUGAACCUUCCGCAG |
| siRNA 375 | 375 | UGCGGAAGGUUCAGGAACA | 5865 | UGUUCCUGAACCUUCCGCA |
| siRNA 376 | 376 | GCGGAAGGUUCAGGAACAA | 5866 | UUGUUCCUGAACCUUCCGC |
| siRNA 377 | 377 | CGGAAGGUUCAGGAACAAG | 5867 | CUUGUUCCUGAACCUUCCG |
| siRNA 378 | 378 | GGAAGGUUCAGGAACAAGU | 5868 | ACUUGUUCCUGAACCUUCC |
| siRNA 379 | 379 | GAAGGUUCAGGAACAAGUG | 5869 | CACUUGUUCCUGAACCUUC |
| siRNA 380 | 380 | AAGGUUCAGGAACAAGUGC | 5870 | GCACUUGUUCCUGAACCUU |
| siRNA 381 | 381 | AGGUUCAGGAACAAGUGCA | 5871 | UGCACUUGUUCCUGAACCU |
| siRNA 382 | 382 | GGUUCAGGAACAAGUGCAU | 5872 | AUGCACUUGUUCCUGAACC |
| siRNA 383 | 383 | GUUCAGGAACAAGUGCAUC | 5873 | GAUGCACUUGUUCCUGAAC |
| siRNA 384 | 384 | UUCAGGAACAAGUGCAUCC | 5874 | GGAUGCACUUGUUCCUGAA |
| siRNA 385 | 385 | UCAGGAACAAGUGCAUCCC | 5875 | GGGAUGCACUUGUUCCUGA |
| siRNA 386 | 386 | CAGGAACAAGUGCAUCCCA | 5876 | UGGGAUGCACUUGUUCCUG |
| siRNA 387 | 387 | AGGAACAAGUGCAUCCCAC | 5877 | GUGGGAUGCACUUGUUCCU |
| siRNA 388 | 388 | GGAACAAGUGCAUCCCACU | 5878 | AGUGGGAUGCACUUGUUCC |
| siRNA 389 | 389 | GAACAAGUGCAUCCCACUC | 5879 | GAGUGGGAUGCACUUGUUC |
| siRNA 390 | 390 | AACAAGUGCAUCCCACUCU | 5880 | AGAGUGGGAUGCACUUGUU |
| siRNA 391 | 391 | ACAAGUGCAUCCCACUCUC | 5881 | GAGAGUGGGAUGCACUUGU |
| siRNA 392 | 392 | CAAGUGCAUCCCACUCUCU | 5882 | AGAGAGUGGGAUGCACUUG |
| siRNA 393 | 393 | AAGUGCAUCCCACUCUCUC | 5883 | GAGAGAGUGGGAUGCACUU |
| siRNA 394 | 394 | AGUGCAUCCCACUCUCUCA | 5884 | UGAGAGAGUGGGAUGCACU |
| siRNA 395 | 395 | GUGCAUCCCACUCUCUCAG | 5885 | CUGAGAGAGUGGGAUGCAC |
| siRNA 396 | 396 | UGCAUCCCACUCUCUCAGC | 5886 | GCUGAGAGAGUGGGAUGCA |
| siRNA 397 | 397 | GCAUCCCACUCUCUCAGCU | 5887 | AGCUGAGAGAGUGGGAUGC |
| siRNA 398 | 398 | CAUCCCACUCUCUCAGCUA | 5888 | UAGCUGAGAGAGUGGGAUG |
| siRNA 399 | 399 | AUCCCACUCUCUCAGCUAA | 5889 | UUAGCUGAGAGAGUGGGAU |
| siRNA 400 | 400 | UCCCACUCUCUCAGCUAAU | 5890 | AUUAGCUGAGAGAGUGGGA |
| siRNA 401 | 401 | CCCACUCUCUCAGCUAAUG | 5891 | CAUUAGCUGAGAGAGUGGG |
| siRNA 402 | 402 | CCACUCUCUCAGCUAAUGA | 5892 | UCAUUAGCUGAGAGAGUGG |
| siRNA 403 | 403 | CACUCUCUCAGCUAAUGAA | 5893 | UUCAUUAGCUGAGAGAGUG |
| siRNA 404 | 404 | ACUCUCUCAGCUAAUGAAG | 5894 | CUUCAUUAGCUGAGAGAGU |
| siRNA 405 | 405 | CUCUCUCAGCUAAUGAAGA | 5895 | UCUUCAUUAGCUGAGAGAG |
| siRNA 406 | 406 | UCUCUCAGCUAAUGAAGAG | 5896 | CUCUUCAUUAGCUGAGAGA |
| siRNA 407 | 407 | CUCUCAGCUAAUGAAGAGU | 5897 | ACUCUUCAUUAGCUGAGAG |
| siRNA 408 | 408 | UCUCAGCUAAUGAAGAGUC | 5898 | GACUCUUCAUUAGCUGAGA |
| siRNA 409 | 409 | CUCAGCUAAUGAAGAGUCU | 5899 | AGACUCUUCAUUAGCUGAG |
| siRNA 410 | 410 | UCAGCUAAUGAAGAGUCUC | 5900 | GAGACUCUUCAUUAGCUGA |
| siRNA 411 | 411 | CAGCUAAUGAAGAGUCUCU | 5901 | AGAGACUCUUCAUUAGCUG |
| siRNA 412 | 412 | AGCUAAUGAAGAGUCUCUC | 5902 | GAGAGACUCUUCAUUAGCU |
| siRNA 413 | 413 | GCUAAUGAAGAGUCUCUCU | 5903 | AGAGAGACUCUUCAUUAGC |
| siRNA 414 | 414 | CUAAUGAAGAGUCUCUCUA | 5904 | UAGAGAGACUCUUCAUUAG |
| siRNA 415 | 415 | UAAUGAAGAGUCUCUCUAU | 5905 | AUAGAGAGACUCUUCAUUA |
| siRNA 416 | 416 | AAUGAAGAGUCUCUCUAUU | 5906 | AAUAGAGAGACUCUUCAUU |
| siRNA 417 | 417 | AUGAAGAGUCUCUCUAUUA | 5907 | UAAUAGAGAGACUCUUCAU |
| siRNA 418 | 418 | UGAAGAGUCUCUCUAUUAU | 5908 | AUAAUAGAGAGACUCUUCA |
| siRNA 419 | 419 | GAAGAGUCUCUCUAUUAUA | 5909 | UAUAAUAGAGAGACUCUUC |
| siRNA 420 | 420 | AAGAGUCUCUCUAUUAUAU | 5910 | AUAUAAUAGAGAGACUCUU |
| siRNA 421 | 421 | AGAGUCUCUCUAUUAUAUU | 5911 | AAUAUAAUAGAGAGACUCU |
| siRNA 422 | 422 | GAGUCUCUCUAUUAUAUUG | 5912 | CAAUAUAAUAGAGAGACUC |
| siRNA 423 | 423 | AGUCUCUCUAUUAUAUUGA | 5913 | UCAAUAUAAUAGAGAGACU |
| siRNA 424 | 424 | GUCUCUCUAUUAUAUUGAA | 5914 | UUCAAUAUAAUAGAGAGAC |
| siRNA 425 | 425 | UCUCUCUAUUAUAUUGAAG | 5915 | CUUCAAUAUAAUAGAGAGA |
| siRNA 426 | 426 | CUCUCUAUUAUAUUGAAGA | 5916 | UCUUCAAUAUAAUAGAGAG |
| siRNA 427 | 427 | UCUCUAUUAUAUUGAAGAG | 5917 | CUCUUCAAUAUAAUAGAGA |
| siRNA 428 | 428 | CUCUAUUAUAUUGAAGAGC | 5918 | GCUCUUCAAUAUAAUAGAG |
| siRNA 429 | 429 | UCUAUUAUAUUGAAGAGCU | 5919 | AGCUCUUCAAUAUAAUAGA |
| siRNA 430 | 430 | CUAUUAUAUUGAAGAGCUG | 5920 | CAGCUCUUCAAUAUAAUAG |
| siRNA 431 | 431 | UAUUAUAUUGAAGAGCUGA | 5921 | UCAGCUCUUCAAUAUAAUA |
| siRNA 432 | 432 | AUUAUAUUGAAGAGCUGAU | 5922 | AUCAGCUCUUCAAUAUAAU |
| siRNA 433 | 433 | UUAUAUUGAAGAGCUGAUU | 5923 | AAUCAGCUCUUCAAUAUAA |
| siRNA 434 | 434 | UAUAUUGAAGAGCUGAUUU | 5924 | AAAUCAGCUCUUCAAUAUA |
| siRNA 435 | 435 | AUAUUGAAGAGCUGAUUUU | 5925 | AAAAUCAGCUCUUCAAUAU |
| siRNA 436 | 436 | UAUUGAAGAGCUGAUUUUU | 5926 | AAAAAUCAGCUCUUCAAUA |
| siRNA 437 | 437 | AUUGAAGAGCUGAUUUUUC | 5927 | GAAAAAUCAGCUCUUCAAU |
| siRNA 438 | 438 | UUGAAGAGCUGAUUUUUCA | 5928 | UGAAAAAUCAGCUCUUCAA |
| siRNA 439 | 439 | UGAAGAGCUGAUUUUUCAG | 5929 | CUGAAAAAUCAGCUCUUCA |
| siRNA 440 | 440 | GAAGAGCUGAUUUUUCAGC | 5930 | GCUGAAAAAUCAGCUCUUC |
| siRNA 441 | 441 | AAGAGCUGAUUUUUCAGCU | 5931 | AGCUGAAAAAUCAGCUCUU |
| siRNA 442 | 442 | AGAGCUGAUUUUUCAGCUG | 5932 | CAGCUGAAAAAUCAGCUCU |
| siRNA 443 | 443 | GAGCUGAUUUUUCAGCUGC | 5933 | GCAGCUGAAAAAUCAGCUC |
| siRNA 444 | 444 | AGCUGAUUUUUCAGCUGCU | 5934 | AGCAGCUGAAAAAUCAGCU |
| siRNA 445 | 445 | GCUGAUUUUUCAGCUGCUU | 5935 | AAGCAGCUGAAAAAUCAGC |
| siRNA 446 | 446 | CUGAUUUUUCAGCUGCUUA | 5936 | UAAGCAGCUGAAAAAUCAG |
| siRNA 447 | 447 | UGAUUUUUCAGCUGCUUAA | 5937 | UUAAGCAGCUGAAAAAUCA |
| siRNA 448 | 448 | GAUUUUUCAGCUGCUUAAU | 5938 | AUUAAGCAGCUGAAAAAUC |
| siRNA 449 | 449 | AUUUUUCAGCUGCUUAAUA | 5939 | UAUUAAGCAGCUGAAAAAU |
| siRNA 450 | 450 | UUUUUCAGCUGCUUAAUAA | 5940 | UUAUUAAGCAGCUGAAAAA |
| siRNA 451 | 451 | UUUUCAGCUGCUUAAUAAA | 5941 | UUUAUUAAGCAGCUGAAAA |
| siRNA 452 | 452 | UUUCAGCUGCUUAAUAAAU | 5942 | AUUUAUUAAGCAGCUGAAA |
| siRNA 453 | 453 | UUCAGCUGCUUAAUAAAUU | 5943 | AAUUUAUUAAGCAGCUGAA |
| siRNA 454 | 454 | UCAGCUGCUUAAUAAAUUA | 5944 | UAAUUUAUUAAGCAGCUGA |
| siRNA 455 | 455 | CAGCUGCUUAAUAAAUUAU | 5945 | AUAAUUUAUUAAGCAGCUG |
| siRNA 456 | 456 | AGCUGCUUAAUAAAUUAUG | 5946 | CAUAAUUUAUUAAGCAGCU |
| siRNA 457 | 457 | GCUGCUUAAUAAAUUAUGC | 5947 | GCAUAAUUUAUUAAGCAGC |
| siRNA 458 | 458 | CUGCUUAAUAAAUUAUGCA | 5948 | UGCAUAAUUUAUUAAGCAG |
| siRNA 459 | 459 | UGCUUAAUAAAUUAUGCAU | 5949 | AUGCAUAAUUUAUUAAGCA |
| siRNA 460 | 460 | GCUUAAUAAAUUAUGCAUG | 5950 | CAUGCAUAAUUUAUUAAGC |
| siRNA 461 | 461 | CUUAAUAAAUUAUGCAUGG | 5951 | CCAUGCAUAAUUUAUUAAG |
| siRNA 462 | 462 | UUAAUAAAUUAUGCAUGGC | 5952 | GCCAUGCAUAAUUUAUUAA |
| siRNA 463 | 463 | UAAUAAAUUAUGCAUGGCC | 5953 | GGCCAUGCAUAAUUUAUUA |
| siRNA 464 | 464 | AAUAAAUUAUGCAUGGCCC | 5954 | GGGCCAUGCAUAAUUUAUU |
| siRNA 465 | 465 | AUAAAUUAUGCAUGGCCCA | 5955 | UGGGCCAUGCAUAAUUUAU |
| siRNA 466 | 466 | UAAAUUAUGCAUGGCCCAG | 5956 | CUGGGCCAUGCAUAAUUUA |
| siRNA 467 | 467 | AAAUUAUGCAUGGCCCAGC | 5957 | GCUGGGCCAUGCAUAAUUU |
| siRNA 468 | 468 | AAUUAUGCAUGGCCCAGCC | 5958 | GGCUGGGCCAUGCAUAAUU |
| siRNA 469 | 469 | AUUAUGCAUGGCCCAGCCA | 5959 | UGGCUGGGCCAUGCAUAAU |
| siRNA 470 | 470 | UUAUGCAUGGCCCAGCCAA | 5960 | UUGGCUGGGCCAUGCAUAA |
| siRNA 471 | 471 | UAUGCAUGGCCCAGCCAAG | 5961 | CUUGGCUGGGCCAUGCAUA |
| siRNA 472 | 472 | AUGCAUGGCCCAGCCAAGG | 5962 | CCUUGGCUGGGCCAUGCAU |
| siRNA 473 | 473 | UGCAUGGCCCAGCCAAGGA | 5963 | UCCUUGGCUGGGCCAUGCA |
| siRNA 474 | 474 | GCAUGGCCCAGCCAAGGAC | 5964 | GUCCUUGGCUGGGCCAUGC |
| siRNA 475 | 475 | CAUGGCCCAGCCAAGGACU | 5965 | AGUCCUUGGCUGGGCCAUG |
| siRNA 476 | 476 | AUGGCCCAGCCAAGGACUG | 5966 | CAGUCCUUGGCUGGGCCAU |
| siRNA 477 | 477 | UGGCCCAGCCAAGGACUGU | 5967 | ACAGUCCUUGGCUGGGCCA |
| siRNA 478 | 478 | GGCCCAGCCAAGGACUGUU | 5968 | AACAGUCCUUGGCUGGGCC |
| siRNA 479 | 479 | GCCCAGCCAAGGACUGUUC | 5969 | GAACAGUCCUUGGCUGGGC |
| siRNA 480 | 480 | CCCAGCCAAGGACUGUUCA | 5970 | UGAACAGUCCUUGGCUGGG |
| siRNA 481 | 481 | CCAGCCAAGGACUGUUCAA | 5971 | UUGAACAGUCCUUGGCUGG |
| siRNA 482 | 482 | CAGCCAAGGACUGUUCAAG | 5972 | CUUGAACAGUCCUUGGCUG |
| siRNA 483 | 483 | AGCCAAGGACUGUUCAAGA | 5973 | UCUUGAACAGUCCUUGGCU |
| siRNA 484 | 484 | GCCAAGGACUGUUCAAGAU | 5974 | AUCUUGAACAGUCCUUGGC |
| siRNA 485 | 485 | CCAAGGACUGUUCAAGAUG | 5975 | CAUCUUGAACAGUCCUUGG |
| siRNA 486 | 486 | CAAGGACUGUUCAAGAUGU | 5976 | ACAUCUUGAACAGUCCUUG |
| siRNA 487 | 487 | AAGGACUGUUCAAGAUGUA | 5977 | UACAUCUUGAACAGUCCUU |
| siRNA 488 | 488 | AGGACUGUUCAAGAUGUAG | 5978 | CUACAUCUUGAACAGUCCU |
| siRNA 489 | 489 | GGACUGUUCAAGAUGUAGA | 5979 | UCUACAUCUUGAACAGUCC |
| siRNA 490 | 490 | GACUGUUCAAGAUGUAGAG | 5980 | CUCUACAUCUUGAACAGUC |
| siRNA 491 | 491 | ACUGUUCAAGAUGUAGAGG | 5981 | CCUCUACAUCUUGAACAGU |
| siRNA 492 | 492 | CUGUUCAAGAUGUAGAGGA | 5982 | UCCUCUACAUCUUGAACAG |
| siRNA 493 | 493 | UGUUCAAGAUGUAGAGGAG | 5983 | CUCCUCUACAUCUUGAACA |
| siRNA 494 | 494 | GUUCAAGAUGUAGAGGAGC | 5984 | GCUCCUCUACAUCUUGAAC |
| siRNA 495 | 495 | UUCAAGAUGUAGAGGAGCG | 5985 | CGCUCCUCUACAUCUUGAA |
| siRNA 496 | 496 | UCAAGAUGUAGAGGAGCGA | 5986 | UCGCUCCUCUACAUCUUGA |
| siRNA 497 | 497 | CAAGAUGUAGAGGAGCGAG | 5987 | CUCGCUCCUCUACAUCUUG |
| siRNA 498 | 498 | AAGAUGUAGAGGAGCGAGU | 5988 | ACUCGCUCCUCUACAUCUU |
| siRNA 499 | 499 | AGAUGUAGAGGAGCGAGUU | 5989 | AACUCGCUCCUCUACAUCU |
| siRNA 500 | 500 | GAUGUAGAGGAGCGAGUUC | 5990 | GAACUCGCUCCUCUACAUC |
| siRNA 501 | 501 | AUGUAGAGGAGCGAGUUCA | 5991 | UGAACUCGCUCCUCUACAU |
| siRNA 502 | 502 | UGUAGAGGAGCGAGUUCAG | 5992 | CUGAACUCGCUCCUCUACA |
| siRNA 503 | 503 | GUAGAGGAGCGAGUUCAGA | 5993 | UCUGAACUCGCUCCUCUAC |
| siRNA 504 | 504 | UAGAGGAGCGAGUUCAGAA | 5994 | UUCUGAACUCGCUCCUCUA |
| siRNA 505 | 505 | AGAGGAGCGAGUUCAGAAG | 5995 | CUUCUGAACUCGCUCCUCU |
| siRNA 506 | 506 | GAGGAGCGAGUUCAGAAGA | 5996 | UCUUCUGAACUCGCUCCUC |
| siRNA 507 | 507 | AGGAGCGAGUUCAGAAGAC | 5997 | GUCUUCUGAACUCGCUCCU |
| siRNA 508 | 508 | GGAGCGAGUUCAGAAGACC | 5998 | GGUCUUCUGAACUCGCUCC |
| siRNA 509 | 509 | GAGCGAGUUCAGAAGACCU | 5999 | AGGUCUUCUGAACUCGCUC |
| siRNA 510 | 510 | AGCGAGUUCAGAAGACCUU | 6000 | AAGGUCUUCUGAACUCGCU |
| siRNA 511 | 511 | GCGAGUUCAGAAGACCUUU | 6001 | AAAGGUCUUCUGAACUCGC |
| siRNA 512 | 512 | CGAGUUCAGAAGACCUUUC | 6002 | GAAAGGUCUUCUGAACUCG |
| siRNA 513 | 513 | GAGUUCAGAAGACCUUUCC | 6003 | GGAAAGGUCUUCUGAACUC |
| siRNA 514 | 514 | AGUUCAGAAGACCUUUCCU | 6004 | AGGAAAGGUCUUCUGAACU |
| siRNA 515 | 515 | GUUCAGAAGACCUUUCCUC | 6005 | GAGGAAAGGUCUUCUGAAC |
| siRNA 516 | 516 | UUCAGAAGACCUUUCCUCA | 6006 | UGAGGAAAGGUCUUCUGAA |
| siRNA 517 | 517 | UCAGAAGACCUUUCCUCAC | 6007 | GUGAGGAAAGGUCUUCUGA |
| siRNA 518 | 518 | CAGAAGACCUUUCCUCACC | 6008 | GGUGAGGAAAGGUCUUCUG |
| siRNA 519 | 519 | AGAAGACCUUUCCUCACCC | 6009 | GGGUGAGGAAAGGUCUUCU |
| siRNA 520 | 520 | GAAGACCUUUCCUCACCCA | 6010 | UGGGUGAGGAAAGGUCUUC |
| siRNA 521 | 521 | AAGACCUUUCCUCACCCAA | 6011 | UUGGGUGAGGAAAGGUCUU |
| siRNA 522 | 522 | AGACCUUUCCUCACCCAAU | 6012 | AUUGGGUGAGGAAAGGUCU |
| siRNA 523 | 523 | GACCUUUCCUCACCCAAUU | 6013 | AAUUGGGUGAGGAAAGGUC |
| siRNA 524 | 524 | ACCUUUCCUCACCCAAUUG | 6014 | CAAUUGGGUGAGGAAAGGU |
| siRNA 525 | 525 | CCUUUCCUCACCCAAUUGA | 6015 | UCAAUUGGGUGAGGAAAGG |
| siRNA 526 | 526 | CUUUCCUCACCCAAUUGAU | 6016 | AUCAAUUGGGUGAGGAAAG |
| siRNA 527 | 527 | UUUCCUCACCCAAUUGAUA | 6017 | UAUCAAUUGGGUGAGGAAA |
| siRNA 528 | 528 | UUCCUCACCCAAUUGAUAA | 6018 | UUAUCAAUUGGGUGAGGAA |
| siRNA 529 | 529 | UCCUCACCCAAUUGAUAAA | 6019 | UUUAUCAAUUGGGUGAGGA |
| siRNA 530 | 530 | CCUCACCCAAUUGAUAAAU | 6020 | AUUUAUCAAUUGGGUGAGG |
| siRNA 531 | 531 | CUCACCCAAUUGAUAAAUG | 6021 | CAUUUAUCAAUUGGGUGAG |
| siRNA 532 | 532 | UCACCCAAUUGAUAAAUGG | 6022 | CCAUUUAUCAAUUGGGUGA |
| siRNA 533 | 533 | CACCCAAUUGAUAAAUGGG | 6023 | CCCAUUUAUCAAUUGGGUG |
| siRNA 534 | 534 | ACCCAAUUGAUAAAUGGGC | 6024 | GCCCAUUUAUCAAUUGGGU |
| siRNA 535 | 535 | CCCAAUUGAUAAAUGGGCC | 6025 | GGCCCAUUUAUCAAUUGGG |
| siRNA 536 | 536 | CCAAUUGAUAAAUGGGCCA | 6026 | UGGCCCAUUUAUCAAUUGG |
| siRNA 537 | 537 | CAAUUGAUAAAUGGGCCAU | 6027 | AUGGCCCAUUUAUCAAUUG |
| siRNA 538 | 538 | AAUUGAUAAAUGGGCCAUU | 6028 | AAUGGCCCAUUUAUCAAUU |
| siRNA 539 | 539 | AUUGAUAAAUGGGCCAUUG | 6029 | CAAUGGCCCAUUUAUCAAU |
| siRNA 540 | 540 | UUGAUAAAUGGGCCAUUGC | 6030 | GCAAUGGCCCAUUUAUCAA |
| siRNA 541 | 541 | UGAUAAAUGGGCCAUUGCU | 6031 | AGCAAUGGCCCAUUUAUCA |
| siRNA 542 | 542 | GAUAAAUGGGCCAUUGCUG | 6032 | CAGCAAUGGCCCAUUUAUC |
| siRNA 543 | 543 | AUAAAUGGGCCAUUGCUGA | 6033 | UCAGCAAUGGCCCAUUUAU |
| siRNA 544 | 544 | UAAAUGGGCCAUUGCUGAU | 6034 | AUCAGCAAUGGCCCAUUUA |
| siRNA 545 | 545 | AAAUGGGCCAUUGCUGAUG | 6035 | CAUCAGCAAUGGCCCAUUU |
| siRNA 546 | 546 | AAUGGGCCAUUGCUGAUGC | 6036 | GCAUCAGCAAUGGCCCAUU |
| siRNA 547 | 547 | AUGGGCCAUUGCUGAUGCA | 6037 | UGCAUCAGCAAUGGCCCAU |
| siRNA 548 | 548 | UGGGCCAUUGCUGAUGCAC | 6038 | GUGCAUCAGCAAUGGCCCA |
| siRNA 549 | 549 | GGGCCAUUGCUGAUGCACA | 6039 | UGUGCAUCAGCAAUGGCCC |
| siRNA 550 | 550 | GGCCAUUGCUGAUGCACAA | 6040 | UUGUGCAUCAGCAAUGGCC |
| siRNA 551 | 551 | GCCAUUGCUGAUGCACAAU | 6041 | AUUGUGCAUCAGCAAUGGC |
| siRNA 552 | 552 | CCAUUGCUGAUGCACAAUC | 6042 | GAUUGUGCAUCAGCAAUGG |
| siRNA 553 | 553 | CAUUGCUGAUGCACAAUCU | 6043 | AGAUUGUGCAUCAGCAAUG |
| siRNA 554 | 554 | AUUGCUGAUGCACAAUCUG | 6044 | CAGAUUGUGCAUCAGCAAU |
| siRNA 555 | 555 | UUGCUGAUGCACAAUCUGC | 6045 | GCAGAUUGUGCAUCAGCAA |
| siRNA 556 | 556 | UGCUGAUGCACAAUCUGCU | 6046 | AGCAGAUUGUGCAUCAGCA |
| siRNA 557 | 557 | GCUGAUGCACAAUCUGCUA | 6047 | UAGCAGAUUGUGCAUCAGC |
| siRNA 558 | 558 | CUGAUGCACAAUCUGCUAU | 6048 | AUAGCAGAUUGUGCAUCAG |
| siRNA 559 | 559 | UGAUGCACAAUCUGCUAUA | 6049 | UAUAGCAGAUUGUGCAUCA |
| siRNA 560 | 560 | GAUGCACAAUCUGCUAUAG | 6050 | CUAUAGCAGAUUGUGCAUC |
| siRNA 561 | 561 | AUGCACAAUCUGCUAUAGA | 6051 | UCUAUAGCAGAUUGUGCAU |
| siRNA 562 | 562 | UGCACAAUCUGCUAUAGAA | 6052 | UUCUAUAGCAGAUUGUGCA |
| siRNA 563 | 563 | GCACAAUCUGCUAUAGAAA | 6053 | UUUCUAUAGCAGAUUGUGC |
| siRNA 564 | 564 | CACAAUCUGCUAUAGAAAA | 6054 | UUUUCUAUAGCAGAUUGUG |
| siRNA 565 | 565 | ACAAUCUGCUAUAGAAAAA | 6055 | UUUUUCUAUAGCAGAUUGU |
| siRNA 566 | 566 | CAAUCUGCUAUAGAAAAAC | 6056 | GUUUUUCUAUAGCAGAUUG |
| siRNA 567 | 567 | AAUCUGCUAUAGAAAAACG | 6057 | CGUUUUUCUAUAGCAGAUU |
| siRNA 568 | 568 | AUCUGCUAUAGAAAAACGA | 6058 | UCGUUUUUCUAUAGCAGAU |
| siRNA 569 | 569 | UCUGCUAUAGAAAAACGAA | 6059 | UUCGUUUUUCUAUAGCAGA |
| siRNA 570 | 570 | CUGCUAUAGAAAAACGAAA | 6060 | UUUCGUUUUUCUAUAGCAG |
| siRNA 571 | 571 | UGCUAUAGAAAAACGAAAA | 6061 | UUUUCGUUUUUCUAUAGCA |
| siRNA 572 | 572 | GCUAUAGAAAAACGAAAAC | 6062 | GUUUUCGUUUUUCUAUAGC |
| siRNA 573 | 573 | CUAUAGAAAAACGAAAACG | 6063 | CGUUUUCGUUUUUCUAUAG |
| siRNA 574 | 574 | UAUAGAAAAACGAAAACGA | 6064 | UCGUUUUCGUUUUUCUAUA |
| siRNA 575 | 575 | AUAGAAAAACGAAAACGAA | 6065 | UUCGUUUUCGUUUUUCUAU |
| siRNA 576 | 576 | UAGAAAAACGAAAACGAAG | 6066 | CUUCGUUUUCGUUUUUCUA |
| siRNA 577 | 577 | AGAAAAACGAAAACGAAGA | 6067 | UCUUCGUUUUCGUUUUUCU |
| siRNA 578 | 578 | GAAAAACGAAAACGAAGAA | 6068 | UUCUUCGUUUUCGUUUUUC |
| siRNA 579 | 579 | AAAAACGAAAACGAAGAAA | 6069 | UUUCUUCGUUUUCGUUUUU |
| siRNA 580 | 580 | AAAACGAAAACGAAGAAAU | 6070 | AUUUCUUCGUUUUCGUUUU |
| siRNA 581 | 581 | AAACGAAAACGAAGAAAUC | 6071 | GAUUUCUUCGUUUUCGUUU |
| siRNA 582 | 582 | AACGAAAACGAAGAAAUCC | 6072 | GGAUUUCUUCGUUUUCGUU |
| siRNA 583 | 583 | ACGAAAACGAAGAAAUCCU | 5073 | AGGAUUUCUUCGUUUUCGU |
| siRNA 584 | 584 | CGAAAACGAAGAAAUCCUC | 6074 | GAGGAUUUCUUCGUUUUCG |
| siRNA 585 | 585 | GAAAACGAAGAAAUCCUCU | 6075 | AGAGGAUUUCUUCGUUUUC |
| siRNA 586 | 586 | AAAACGAAGAAAUCCUCUU | 6076 | AAGAGGAUUUCUUCGUUUU |
| siRNA 587 | 587 | AAACGAAGAAAUCCUCUUU | 6077 | AAAGAGGAUUUCUUCGUUU |
| siRNA 588 | 588 | AACGAAGAAAUCCUCUUUU | 6078 | AAAAGAGGAUUUCUUCGUU |
| siRNA 589 | 589 | ACGAAGAAAUCCUCUUUUA | 6079 | UAAAAGAGGAUUUCUUCGU |
| siRNA 590 | 590 | CGAAGAAAUCCUCUUUUAC | 6080 | GUAAAAGAGGAUUUCUUCG |
| siRNA 591 | 591 | GAAGAAAUCCUCUUUUACU | 6081 | AGUAAAAGAGGAUUUCUUC |
| siRNA 592 | 592 | AAGAAAUCCUCUUUUACUG | 6082 | CAGUAAAAGAGGAUUUCUU |
| siRNA 593 | 593 | AGAAAUCCUCUUUUACUGC | 6083 | GCAGUAAAAGAGGAUUUCU |
| siRNA 594 | 594 | GAAAUCCUCUUUUACUGCC | 6084 | GGCAGUAAAAGAGGAUUUC |
| siRNA 595 | 595 | AAAUCCUCUUUUACUGCCU | 6085 | AGGCAGUAAAAGAGGAUUU |
| siRNA 596 | 596 | AAUCCUCUUUUACUGCCUG | 6086 | CAGGCAGUAAAAGAGGAUU |
| siRNA 597 | 597 | AUCCUCUUUUACUGCCUGU | 6087 | ACAGGCAGUAAAAGAGGAU |
| siRNA 598 | 598 | UCCUCUUUUACUGCCUGUG | 6088 | CACAGGCAGUAAAAGAGGA |
| siRNA 599 | 599 | CCUCUUUUACUGCCUGUGG | 6089 | CCACAGGCAGUAAAAGAGG |
| siRNA 600 | 600 | CUCUUUUACUGCCUGUGGA | 6090 | UCCACAGGCAGUAAAAGAG |
| siRNA 601 | 601 | UCUUUUACUGCCUGUGGAC | 6091 | GUCCACAGGCAGUAAAAGA |
| siRNA 602 | 602 | CUUUUACUGCCUGUGGACA | 6092 | UGUCCACAGGCAGUAAAAG |
| siRNA 603 | 603 | UUUUACUGCCUGUGGACAA | 6093 | UUGUCCACAGGCAGUAAAA |
| siRNA 604 | 604 | UUUACUGCCUGUGGACAAA | 6094 | UUUGUCCACAGGCAGUAAA |
| siRNA 605 | 605 | UUACUGCCUGUGGACAAAA | 6095 | UUUUGUCCACAGGCAGUAA |
| siRNA 606 | 606 | UACUGCCUGUGGACAAAAU | 6096 | AUUUUGUCCACAGGCAGUA |
| siRNA 607 | 607 | ACUGCCUGUGGACAAAAUC | 6097 | GAUUUUGUCCACAGGCAGU |
| siRNA 608 | 608 | CUGCCUGUGGACAAAAUCC | 6098 | GGAUUUUGUCCACAGGCAG |
| siRNA 609 | 609 | UGCCUGUGGACAAAAUCCA | 6099 | UGGAUUUUGUCCACAGGCA |
| siRNA 610 | 610 | GCCUGUGGACAAAAUCCAU | 6100 | AUGGAUUUUGUCCACAGGC |
| siRNA 611 | 611 | CCUGUGGACAAAAUCCAUC | 6101 | GAUGGAUUUUGUCCACAGG |
| siRNA 612 | 612 | CUGUGGACAAAAUCCAUCC | 6102 | GGAUGGAUUUUGUCCACAG |
| siRNA 613 | 613 | UGUGGACAAAAUCCAUCCU | 6103 | AGGAUGGAUUUUGUCCACA |
| siRNA 614 | 614 | GUGGACAAAAUCCAUCCUU | 6104 | AAGGAUGGAUUUUGUCCAC |
| siRNA 615 | 615 | UGGACAAAAUCCAUCCUUC | 6105 | GAAGGAUGGAUUUUGUCCA |
| siRNA 616 | 616 | GGACAAAAUCCAUCCUUCG | 6106 | CGAAGGAUGGAUUUUGUCC |
| siRNA 617 | 617 | GACAAAAUCCAUCCUUCGU | 6107 | ACGAAGGAUGGAUUUUGUC |
| siRNA 618 | 618 | ACAAAAUCCAUCCUUCGUU | 6108 | AACGAAGGAUGGAUUUUGU |
| siRNA 619 | 619 | CAAAAUCCAUCCUUCGUUG | 6109 | CAACGAAGGAUGGAUUUUG |
| siRNA 620 | 620 | AAAAUCCAUCCUUCGUUGA | 6110 | UCAACGAAGGAUGGAUUUU |
| siRNA 621 | 621 | AAAUCCAUCCUUCGUUGAA | 6111 | UUCAACGAAGGAUGGAUUU |
| siRNA 622 | 622 | AAUCCAUCCUUCGUUGAAG | 6112 | CUUCAACGAAGGAUGGAUU |
| siRNA 623 | 623 | AUCCAUCCUUCGUUGAAGG | 6113 | CCUUCAACGAAGGAUGGAU |
| siRNA 624 | 624 | UCCAUCCUUCGUUGAAGGA | 6114 | UCCUUCAACGAAGGAUGGA |
| siRNA 625 | 625 | CCAUCCUUCGUUGAAGGAA | 6115 | UUCCUUCAACGAAGGAUGG |
| siRNA 626 | 626 | CAUCCUUCGUUGAAGGAAG | 6116 | CUUCCUUCAACGAAGGAUG |
| siRNA 627 | 627 | AUCCUUCGUUGAAGGAAGU | 6117 | ACUUCCUUCAACGAAGGAU |
| siRNA 628 | 628 | UCCUUCGUUGAAGGAAGUA | 6118 | UACUUCCUUCAACGAAGGA |
| siRNA 629 | 629 | CCUUCGUUGAAGGAAGUAU | 6119 | AUACUUCCUUCAACGAAGG |
| siRNA 630 | 630 | CUUCGUUGAAGGAAGUAUU | 6120 | AAUACUUCCUUCAACGAAG |
| siRNA 631 | 631 | UUCGUUGAAGGAAGUAUUA | 6121 | UAAUACUUCCUUCAACGAA |
| siRNA 632 | 632 | UCGUUGAAGGAAGUAUUAG | 6122 | CUAAUACUUCCUUCAACGA |
| siRNA 633 | 633 | CGUUGAAGGAAGUAUUAGG | 6123 | CCUAAUACUUCCUUCAACG |
| siRNA 634 | 634 | GUUGAAGGAAGUAUUAGGG | 6124 | CCCUAAUACUUCCUUCAAC |
| siRNA 635 | 635 | UUGAAGGAAGUAUUAGGGU | 6125 | ACCCUAAUACUUCCUUCAA |
| siRNA 636 | 636 | UGAAGGAAGUAUUAGGGUA | 6126 | UACCCUAAUACUUCCUUCA |
| siRNA 637 | 637 | GAAGGAAGUAUUAGGGUAC | 6127 | GUACCCUAAUACUUCCUUC |
| siRNA 638 | 638 | AAGGAAGUAUUAGGGUACA | 6128 | UGUACCCUAAUACUUCCUU |
| siRNA 639 | 639 | AGGAAGUAUUAGGGUACAA | 6129 | UUGUACCCUAAUACUUCCU |
| siRNA 640 | 640 | GGAAGUAUUAGGGUACAAA | 6130 | UUUGUACCCUAAUACUUCC |
| siRNA 641 | 641 | GAAGUAUUAGGGUACAAAG | 6131 | CUUUGUACCCUAAUACUUC |
| siRNA 642 | 642 | AAGUAUUAGGGUACAAAGU | 6132 | ACUUUGUACCCUAAUACUU |
| siRNA 643 | 643 | AGUAUUAGGGUACAAAGUG | 6133 | CACUUUGUACCCUAAUACU |
| siRNA 644 | 644 | GUAUUAGGGUACAAAGUGG | 6134 | CCACUUUGUACCCUAAUAC |
| siRNA 645 | 645 | UAUUAGGGUACAAAGUGGA | 6135 | UCCACUUUGUACCCUAAUA |
| siRNA 646 | 646 | AUUAGGGUACAAAGUGGAC | 6136 | GUCCACUUUGUACCCUAAU |
| siRNA 647 | 647 | UUAGGGUACAAAGUGGACU | 6137 | AGUCCACUUUGUACCCUAA |
| siRNA 648 | 648 | UAGGGUACAAAGUGGACUA | 6138 | UAGUCCACUUUGUACCCUA |
| siRNA 649 | 649 | AGGGUACAAAGUGGACUAC | 6139 | GUAGUCCACUUUGUACCCU |
| siRNA 650 | 650 | GGGUACAAAGUGGACUACC | 6140 | GGUAGUCCACUUUGUACCC |
| siRNA 651 | 651 | GGUACAAAGUGGACUACCA | 6141 | UGGUAGUCCACUUUGUACC |
| siRNA 652 | 652 | GUACAAAGUGGACUACCAU | 6142 | AUGGUAGUCCACUUUGUAC |
| siRNA 653 | 653 | UACAAAGUGGACUACCAUG | 6143 | CAUGGUAGUCCACUUUGUA |
| siRNA 654 | 654 | ACAAAGUGGACUACCAUGU | 6144 | ACAUGGUAGUCCACUUUGU |
| siRNA 655 | 655 | CAAAGUGGACUACCAUGUA | 6145 | UACAUGGUAGUCCACUUUG |
| siRNA 656 | 656 | AAAGUGGACUACCAUGUAU | 6146 | AUACAUGGUAGUCCACUUU |
| siRNA 657 | 657 | AAGUGGACUACCAUGUAUC | 6147 | GAUACAUGGUAGUCCACUU |
| siRNA 658 | 658 | AGUGGACUACCAUGUAUCC | 6148 | GGAUACAUGGUAGUCCACU |
| siRNA 659 | 659 | GUGGACUACCAUGUAUCCC | 6149 | GGGAUACAUGGUAGUCCAC |
| siRNA 660 | 660 | UGGACUACCAUGUAUCCCU | 6150 | AGGGAUACAUGGUAGUCCA |
| siRNA 661 | 661 | GGACUACCAUGUAUCCCUA | 6151 | UAGGGAUACAUGGUAGUCC |
| siRNA 662 | 662 | GACUACCAUGUAUCCCUAU | 6152 | AUAGGGAUACAUGGUAGUC |
| siRNA 663 | 663 | ACUACCAUGUAUCCCUAUA | 6153 | UAUAGGGAUACAUGGUAGU |
| siRNA 664 | 664 | CUACCAUGUAUCCCUAUAU | 6154 | AUAUAGGGAUACAUGGUAG |
| siRNA 665 | 665 | UACCAUGUAUCCCUAUAUA | 6155 | UAUAUAGGGAUACAUGGUA |
| siRNA 666 | 666 | ACCAUGUAUCCCUAUAUAU | 6156 | AUAUAUAGGGAUACAUGGU |
| siRNA 667 | 667 | CCAUGUAUCCCUAUAUAUU | 6157 | AAUAUAUAGGGAUACAUGG |
| siRNA 668 | 668 | CAUGUAUCCCUAUAUAUUG | 6158 | CAAUAUAUAGGGAUACAUG |
| siRNA 669 | 669 | AUGUAUCCCUAUAUAUUGU | 6159 | ACAAUAUAUAGGGAUACAU |
| siRNA 670 | 670 | UGUAUCCCUAUAUAUUGUG | 6160 | CACAAUAUAUAGGGAUACA |
| siRNA 671 | 671 | GUAUCCCUAUAUAUUGUGG | 6161 | CCACAAUAUAUAGGGAUAC |
| siRNA 672 | 672 | UAUCCCUAUAUAUUGUGGC | 6162 | GCCACAAUAUAUAGGGAUA |
| siRNA 673 | 673 | AUCCCUAUAUAUUGUGGCU | 6163 | AGCCACAAUAUAUAGGGAU |
| siRNA 674 | 674 | UCCCUAUAUAUUGUGGCUG | 6164 | CAGCCACAAUAUAUAGGGA |
| siRNA 675 | 675 | CCCUAUAUAUUGUGGCUGU | 6165 | ACAGCCACAAUAUAUAGGG |
| siRNA 676 | 676 | CCUAUAUAUUGUGGCUGUA | 6166 | UACAGCCACAAUAUAUAGG |
| siRNA 677 | 677 | CUAUAUAUUGUGGCUGUAC | 6167 | GUACAGCCACAAUAUAUAG |
| siRNA 678 | 678 | UAUAUAUUGUGGCUGUACU | 6168 | AGUACAGCCACAAUAUAUA |
| siRNA 679 | 679 | AUAUAUUGUGGCUGUACUA | 6169 | UAGUACAGCCACAAUAUAU |
| siRNA 680 | 680 | UAUAUUGUGGCUGUACUAG | 6170 | CUAGUACAGCCACAAUAUA |
| siRNA 681 | 681 | AUAUUGUGGCUGUACUAGA | 6171 | UCUAGUACAGCCACAAUAU |
| siRNA 682 | 682 | UAUUGUGGCUGUACUAGAG | 6172 | CUCUAGUACAGCCACAAUA |
| siRNA 683 | 683 | AUUGUGGCUGUACUAGAGU | 6173 | ACUCUAGUACAGCCACAAU |
| siRNA 684 | 684 | UUGUGGCUGUACUAGAGUA | 6174 | UACUCUAGUACAGCCACAA |
| siRNA 685 | 685 | UGUGGCUGUACUAGAGUAU | 6175 | AUACUCUAGUACAGCCACA |
| siRNA 686 | 686 | GUGGCUGUACUAGAGUAUA | 6176 | UAUACUCUAGUACAGCCAC |
| siRNA 687 | 687 | UGGCUGUACUAGAGUAUAU | 6177 | AUAUACUCUAGUACAGCCA |
| siRNA 688 | 688 | GGCUGUACUAGAGUAUAUC | 6178 | GAUAUACUCUAGUACAGCC |
| siRNA 689 | 689 | GCUGUACUAGAGUAUAUCU | 6179 | AGAUAUACUCUAGUACAGC |
| siRNA 690 | 690 | CUGUACUAGAGUAUAUCUC | 6180 | GAGAUAUACUCUAGUACAG |
| siRNA 691 | 691 | UGUACUAGAGUAUAUCUCA | 6181 | UGAGAUAUACUCUAGUACA |
| siRNA 692 | 692 | GUACUAGAGUAUAUCUCAG | 6182 | CUGAGAUAUACUCUAGUAC |
| siRNA 693 | 693 | UACUAGAGUAUAUCUCAGC | 6183 | GCUGAGAUAUACUCUAGUA |
| siRNA 694 | 694 | ACUAGAGUAUAUCUCAGCU | 6184 | AGCUGAGAUAUACUCUAGU |
| siRNA 695 | 695 | CUAGAGUAUAUCUCAGCUG | 6185 | CAGCUGAGAUAUACUCUAG |
| siRNA 696 | 696 | UAGAGUAUAUCUCAGCUGA | 6186 | UCAGCUGAGAUAUACUCUA |
| siRNA 697 | 697 | AGAGUAUAUCUCAGCUGAU | 6187 | AUCAGCUGAGAUAUACUCU |
| siRNA 698 | 698 | GAGUAUAUCUCAGCUGAUA | 6188 | UAUCAGCUGAGAUAUACUC |
| siRNA 699 | 699 | AGUAUAUCUCAGCUGAUAU | 6189 | AUAUCAGCUGAGAUAUACU |
| siRNA 700 | 700 | GUAUAUCUCAGCUGAUAUU | 6190 | AAUAUCAGCUGAGAUAUAC |
| siRNA 701 | 701 | UAUAUCUCAGCUGAUAUUU | 6191 | AAAUAUCAGCUGAGAUAUA |
| siRNA 702 | 702 | AUAUCUCAGCUGAUAUUUU | 6192 | AAAAUAUCAGCUGAGAUAU |
| siRNA 703 | 703 | UAUCUCAGCUGAUAUUUUA | 6193 | UAAAAUAUCAGCUGAGAUA |
| siRNA 704 | 704 | AUCUCAGCUGAUAUUUUAA | 6194 | UUAAAAUAUCAGCUGAGAU |
| siRNA 705 | 705 | UCUCAGCUGAUAUUUUAAA | 6195 | UUUAAAAUAUCAGCUGAGA |
| siRNA 706 | 706 | CUCAGCUGAUAUUUUAAAA | 6196 | UUUUAAAAUAUCAGCUGAG |
| siRNA 707 | 707 | UCAGCUGAUAUUUUAAAAU | 6197 | AUUUUAAAAUAUCAGCUGA |
| siRNA 708 | 708 | CAGCUGAUAUUUUAAAAUU | 6198 | AAUUUUAAAAUAUCAGCUG |
| siRNA 709 | 709 | AGCUGAUAUUUUAAAAUUG | 6199 | CAAUUUUAAAAUAUCAGCU |
| siRNA 710 | 710 | GCUGAUAUUUUAAAAUUGG | 6200 | CCAAUUUUAAAAUAUCAGC |
| siRNA 711 | 711 | CUGAUAUUUUAAAAUUGGC | 6201 | GCCAAUUUUAAAAUAUCAG |
| siRNA 712 | 712 | UGAUAUUUUAAAAUUGGCU | 6202 | AGCCAAUUUUAAAAUAUCA |
| siRNA 713 | 713 | GAUAUUUUAAAAUUGGCUG | 6203 | CAGCCAAUUUUAAAAUAUC |
| siRNA 714 | 714 | AUAUUUUAAAAUUGGCUGG | 6204 | CCAGCCAAUUUUAAAAUAU |
| siRNA 715 | 715 | UAUUUUAAAAUUGGCUGGU | 6205 | ACCAGCCAAUUUUAAAAUA |
| siRNA 716 | 716 | AUUUUAAAAUUGGCUGGUA | 6206 | UACCAGCCAAUUUUAAAAU |
| siRNA 717 | 717 | UUUUAAAAUUGGCUGGUAA | 6207 | UUACCAGCCAAUUUUAAAA |
| siRNA 718 | 718 | UUUAAAAUUGGCUGGUAAU | 6208 | AUUACCAGCCAAUUUUAAA |
| siRNA 719 | 719 | UUAAAAUUGGCUGGUAAUU | 6209 | AAUUACCAGCCAAUUUUAA |
| siRNA 720 | 720 | UAAAAUUGGCUGGUAAUUA | 6210 | UAAUUACCAGCCAAUUUUA |
| siRNA 721 | 721 | AAAAUUGGCUGGUAAUUAU | 6211 | AUAAUUACCAGCCAAUUUU |
| siRNA 722 | 722 | AAAUUGGCUGGUAAUUAUG | 6212 | CAUAAUUACCAGCCAAUUU |
| siRNA 723 | 723 | AAUUGGCUGGUAAUUAUGU | 6213 | ACAUAAUUACCAGCCAAUU |
| siRNA 724 | 724 | AUUGGCUGGUAAUUAUGUU | 6214 | AACAUAAUUACCAGCCAAU |
| siRNA 725 | 725 | UUGGCUGGUAAUUAUGUUU | 6215 | AAACAUAAUUACCAGCCAA |
| siRNA 726 | 726 | UGGCUGGUAAUUAUGUUUU | 6216 | AAAACAUAAUUACCAGCCA |
| siRNA 727 | 727 | GGCUGGUAAUUAUGUUUUU | 6217 | AAAAACAUAAUUACCAGCC |
| siRNA 728 | 728 | GCUGGUAAUUAUGUUUUUA | 6218 | UAAAAACAUAAUUACCAGC |
| siRNA 729 | 729 | CUGGUAAUUAUGUUUUUAA | 6219 | UUAAAAACAUAAUUACCAG |
| siRNA 730 | 730 | UGGUAAUUAUGUUUUUAAU | 6220 | AUUAAAAACAUAAUUACCA |
| siRNA 731 | 731 | GGUAAUUAUGUUUUUAAUA | 6221 | UAUUAAAAACAUAAUUACC |
| siRNA 732 | 732 | GUAAUUAUGUUUUUAAUAU | 6222 | AUAUUAAAAACAUAAUUAC |
| siRNA 733 | 733 | UAAUUAUGUUUUUAAUAUC | 6223 | GAUAUUAAAAACAUAAUUA |
| siRNA 734 | 734 | AAUUAUGUUUUUAAUAUCC | 6224 | GGAUAUUAAAAACAUAAUU |
| siRNA 735 | 735 | AUUAUGUUUUUAAUAUCCG | 6225 | CGGAUAUUAAAAACAUAAU |
| siRNA 736 | 736 | UUAUGUUUUUAAUAUCCGG | 6226 | CCGGAUAUUAAAAACAUAA |
| siRNA 737 | 737 | UAUGUUUUUAAUAUCCGGC | 6227 | GCCGGAUAUUAAAAACAUA |
| siRNA 738 | 738 | AUGUUUUUAAUAUCCGGCA | 6228 | UGCCGGAUAUUAAAAACAU |
| siRNA 739 | 739 | UGUUUUUAAUAUCCGGCAU | 6229 | AUGCCGGAUAUUAAAAACA |
| siRNA 740 | 740 | GUUUUUAAUAUCCGGCAUU | 6230 | AAUGCCGGAUAUUAAAAAC |
| siRNA 741 | 741 | UUUUUAAUAUCCGGCAUUA | 6231 | UAAUGCCGGAUAUUAAAAA |
| siRNA 742 | 742 | UUUUAAUAUCCGGCAUUAU | 6232 | AUAAUGCCGGAUAUUAAAA |
| siRNA 743 | 743 | UUUAAUAUCCGGCAUUAUG | 6233 | CAUAAUGCCGGAUAUUAAA |
| siRNA 744 | 744 | UUAAUAUCCGGCAUUAUGA | 6234 | UCAUAAUGCCGGAUAUUAA |
| siRNA 745 | 745 | UAAUAUCCGGCAUUAUGAA | 6235 | UUCAUAAUGCCGGAUAUUA |
| siRNA 746 | 746 | AAUAUCCGGCAUUAUGAAA | 6236 | UUUCAUAAUGCCGGAUAUU |
| siRNA 747 | 747 | AUAUCCGGCAUUAUGAAAU | 6237 | AUUUCAUAAUGCCGGAUAU |
| siRNA 748 | 748 | UAUCCGGCAUUAUGAAAUA | 6238 | UAUUUCAUAAUGCCGGAUA |
| siRNA 749 | 749 | AUCCGGCAUUAUGAAAUAU | 6239 | AUAUUUCAUAAUGCCGGAU |
| siRNA 750 | 750 | UCCGGCAUUAUGAAAUAUC | 6240 | GAUAUUUCAUAAUGCCGGA |
| siRNA 751 | 751 | CCGGCAUUAUGAAAUAUCU | 6241 | AGAUAUUUCAUAAUGCCGG |
| siRNA 752 | 752 | CGGCAUUAUGAAAUAUCUC | 6242 | GAGAUAUUUCAUAAUGCCG |
| siRNA 753 | 753 | GGCAUUAUGAAAUAUCUCA | 6243 | UGAGAUAUUUCAUAAUGCC |
| siRNA 754 | 754 | GCAUUAUGAAAUAUCUCAG | 6244 | CUGAGAUAUUUCAUAAUGC |
| siRNA 755 | 755 | CAUUAUGAAAUAUCUCAGC | 6245 | GCUGAGAUAUUUCAUAAUG |
| siRNA 756 | 756 | AUUAUGAAAUAUCUCAGCA | 6246 | UGCUGAGAUAUUUCAUAAU |
| siRNA 757 | 757 | UUAUGAAAUAUCUCAGCAG | 6247 | CUGCUGAGAUAUUUCAUAA |
| siRNA 758 | 758 | UAUGAAAUAUCUCAGCAGG | 6248 | CCUGCUGAGAUAUUUCAUA |
| siRNA 759 | 759 | AUGAAAUAUCUCAGCAGGA | 6249 | UCCUGCUGAGAUAUUUCAU |
| siRNA 760 | 760 | UGAAAUAUCUCAGCAGGAC | 6250 | GUCCUGCUGAGAUAUUUCA |
| siRNA 761 | 761 | GAAAUAUCUCAGCAGGACA | 6251 | UGUCCUGCUGAGAUAUUUC |
| siRNA 762 | 762 | AAAUAUCUCAGCAGGACAU | 6252 | AUGUCCUGCUGAGAUAUUU |
| siRNA 763 | 763 | AAUAUCUCAGCAGGACAUU | 6253 | AAUGUCCUGCUGAGAUAUU |
| siRNA 764 | 764 | AUAUCUCAGCAGGACAUUA | 6254 | UAAUGUCCUGCUGAGAUAU |
| siRNA 765 | 765 | UAUCUCAGCAGGACAUUAA | 6255 | UUAAUGUCCUGCUGAGAUA |
| siRNA 766 | 766 | AUCUCAGCAGGACAUUAAA | 6256 | UUUAAUGUCCUGCUGAGAU |
| siRNA 767 | 767 | UCUCAGCAGGACAUUAAAG | 6257 | CUUUAAUGUCCUGCUGAGA |
| siRNA 768 | 768 | CUCAGCAGGACAUUAAAGU | 6258 | ACUUUAAUGUCCUGCUGAG |
| siRNA 769 | 769 | UCAGCAGGACAUUAAAGUG | 6259 | CACUUUAAUGUCCUGCUGA |
| siRNA 770 | 770 | CAGCAGGACAUUAAAGUGU | 6260 | ACACUUUAAUGUCCUGCUG |
| siRNA 771 | 771 | AGCAGGACAUUAAAGUGUC | 6261 | GACACUUUAAUGUCCUGCU |
| siRNA 772 | 772 | GCAGGACAUUAAAGUGUCA | 6262 | UGACACUUUAAUGUCCUGC |
| siRNA 773 | 773 | CAGGACAUUAAAGUGUCAA | 6263 | UUGACACUUUAAUGUCCUG |
| siRNA 774 | 774 | AGGACAUUAAAGUGUCAAU | 6264 | AUUGACACUUUAAUGUCCU |
| siRNA 775 | 775 | GGACAUUAAAGUGUCAAUG | 6265 | CAUUGACACUUUAAUGUCC |
| siRNA 776 | 776 | GACAUUAAAGUGUCAAUGU | 6266 | ACAUUGACACUUUAAUGUC |
| siRNA 777 | 777 | ACAUUAAAGUGUCAAUGUG | 6267 | CACAUUGACACUUUAAUGU |
| siRNA 778 | 778 | CAUUAAAGUGUCAAUGUGU | 6268 | ACACAUUGACACUUUAAUG |
| siRNA 779 | 779 | AUUAAAGUGUCAAUGUGUG | 6269 | CACACAUUGACACUUUAAU |
| siRNA 780 | 780 | UUAAAGUGUCAAUGUGUGC | 6270 | GCACACAUUGACACUUUAA |
| siRNA 781 | 781 | UAAAGUGUCAAUGUGUGCG | 6271 | CGCACACAUUGACACUUUA |
| siRNA 782 | 782 | AAAGUGUCAAUGUGUGCGG | 6272 | CCGCACACAUUGACACUUU |
| siRNA 783 | 783 | AAGUGUCAAUGUGUGCGGA | 6273 | UCCGCACACAUUGACACUU |
| siRNA 784 | 784 | AGUGUCAAUGUGUGCGGAU | 6274 | AUCCGCACACAUUGACACU |
| siRNA 785 | 785 | GUGUCAAUGUGUGCGGAUA | 6275 | UAUCCGCACACAUUGACAC |
| siRNA 786 | 786 | UGUCAAUGUGUGCGGAUAA | 6276 | UUAUCCGCACACAUUGACA |
| siRNA 787 | 787 | GUCAAUGUGUGCGGAUAAG | 6277 | CUUAUCCGCACACAUUGAC |
| siRNA 788 | 788 | UCAAUGUGUGCGGAUAAGG | 6278 | CCUUAUCCGCACACAUUGA |
| siRNA 789 | 789 | CAAUGUGUGCGGAUAAGGU | 6279 | ACCUUAUCCGCACACAUUG |
| siRNA 790 | 790 | AAUGUGUGCGGAUAAGGUU | 6280 | AACCUUAUCCGCACACAUU |
| siRNA 791 | 791 | AUGUGUGCGGAUAAGGUUU | 6281 | AAACCUUAUCCGCACACAU |
| siRNA 792 | 792 | UGUGUGCGGAUAAGGUUUU | 6282 | AAAACCUUAUCCGCACACA |
| siRNA 793 | 793 | GUGUGCGGAUAAGGUUUUG | 6283 | CAAAACCUUAUCCGCACAC |
| siRNA 794 | 794 | UGUGCGGAUAAGGUUUUGA | 6284 | UCAAAACCUUAUCCGCACA |
| siRNA 795 | 795 | GUGCGGAUAAGGUUUUGAU | 6285 | AUCAAAACCUUAUCCGCAC |
| siRNA 796 | 796 | UGCGGAUAAGGUUUUGAUG | 6286 | CAUCAAAACCUUAUCCGCA |
| siRNA 797 | 797 | GCGGAUAAGGUUUUGAUGG | 6287 | CCAUCAAAACCUUAUCCGC |
| siRNA 798 | 798 | CGGAUAAGGUUUUGAUGGA | 6288 | UCCAUCAAAACCUUAUCCG |
| siRNA 799 | 799 | GGAUAAGGUUUUGAUGGAC | 6289 | GUCCAUCAAAACCUUAUCC |
| siRNA 800 | 800 | GAUAAGGUUUUGAUGGACA | 6290 | UGUCCAUCAAAACCUUAUC |
| siRNA 801 | 801 | AUAAGGUUUUGAUGGACAU | 6291 | AUGUCCAUCAAAACCUUAU |
| siRNA 802 | 802 | UAAGGUUUUGAUGGACAUG | 6292 | CAUGUCCAUCAAAACCUUA |
| siRNA 803 | 803 | AAGGUUUUGAUGGACAUGU | 6293 | ACAUGUCCAUCAAAACCUU |
| siRNA 804 | 804 | AGGUUUUGAUGGACAUGUU | 6294 | AACAUGUCCAUCAAAACCU |
| siRNA 805 | 805 | GGUUUUGAUGGACAUGUUU | 6295 | AAACAUGUCCAUCAAAACC |
| siRNA 806 | 806 | GUUUUGAUGGACAUGUUUG | 6296 | CAAACAUGUCCAUCAAAAC |
| siRNA 807 | 807 | UUUUGAUGGACAUGUUUGA | 6297 | UCAAACAUGUCCAUCAAAA |
| siRNA 808 | 808 | UUUGAUGGACAUGUUUGAU | 6298 | AUCAAACAUGUCCAUCAAA |
| siRNA 809 | 809 | UUGAUGGACAUGUUUGAUC | 6299 | GAUCAAACAUGUCCAUCAA |
| siRNA 810 | 810 | UGAUGGACAUGUUUGAUCA | 6300 | UGAUCAAACAUGUCCAUCA |
| siRNA 811 | 811 | GAUGGACAUGUUUGAUCAG | 6301 | CUGAUCAAACAUGUCCAUC |
| siRNA 812 | 812 | AUGGACAUGUUUGAUCAGG | 6302 | CCUGAUCAAACAUGUCCAU |
| siRNA 813 | 813 | UGGACAUGUUUGAUCAGGA | 6303 | UCCUGAUCAAACAUGUCCA |
| siRNA 814 | 814 | GGACAUGUUUGAUCAGGAU | 6304 | AUCCUGAUCAAACAUGUCC |
| siRNA 815 | 815 | GACAUGUUUGAUCAGGAUG | 6305 | CAUCCUGAUCAAACAUGUC |
| siRNA 816 | 816 | ACAUGUUUGAUCAGGAUGA | 6306 | UCAUCCUGAUCAAACAUGU |
| siRNA 817 | 817 | CAUGUUUGAUCAGGAUGAC | 6307 | GUCAUCCUGAUCAAACAUG |
| siRNA 818 | 818 | AUGUUUGAUCAGGAUGACA | 6308 | UGUCAUCCUGAUCAAACAU |
| siRNA 819 | 819 | UGUUUGAUCAGGAUGACAU | 6309 | AUGUCAUCCUGAUCAAACA |
| siRNA 820 | 820 | GUUUGAUCAGGAUGACAUA | 6310 | UAUGUCAUCCUGAUCAAAC |
| siRNA 821 | 821 | UUUGAUCAGGAUGACAUAG | 6311 | CUAUGUCAUCCUGAUCAAA |
| siRNA 822 | 822 | UUGAUCAGGAUGACAUAGG | 6312 | CCUAUGUCAUCCUGAUCAA |
| siRNA 823 | 823 | UGAUCAGGAUGACAUAGGU | 6313 | ACCUAUGUCAUCCUGAUCA |
| siRNA 824 | 824 | GAUCAGGAUGACAUAGGUU | 6314 | AACCUAUGUCAUCCUGAUC |
| siRNA 825 | 825 | AUCAGGAUGACAUAGGUUU | 6315 | AAACCUAUGUCAUCCUGAU |
| siRNA 826 | 826 | UCAGGAUGACAUAGGUUUG | 6316 | CAAACCUAUGUCAUCCUGA |
| siRNA 827 | 827 | CAGGAUGACAUAGGUUUGG | 6317 | CCAAACCUAUGUCAUCCUG |
| siRNA 828 | 828 | AGGAUGACAUAGGUUUGGU | 6318 | ACCAAACCUAUGUCAUCCU |
| siRNA 829 | 829 | GGAUGACAUAGGUUUGGUU | 6319 | AACCAAACCUAUGUCAUCC |
| siRNA 830 | 830 | GAUGACAUAGGUUUGGUUU | 6320 | AAACCAAACCUAUGUCAUC |
| siRNA 831 | 831 | AUGACAUAGGUUUGGUUUC | 6321 | GAAACCAAACCUAUGUCAU |
| siRNA 832 | 832 | UGACAUAGGUUUGGUUUCU | 6322 | AGAAACCAAACCUAUGUCA |
| siRNA 833 | 833 | GACAUAGGUUUGGUUUCUC | 6323 | GAGAAACCAAACCUAUGUC |
| siRNA 834 | 834 | ACAUAGGUUUGGUUUCUCU | 6324 | AGAGAAACCAAACCUAUGU |
| siRNA 835 | 835 | CAUAGGUUUGGUUUCUCUC | 6325 | GAGAGAAACCAAACCUAUG |
| siRNA 836 | 836 | AUAGGUUUGGUUUCUCUCU | 6326 | AGAGAGAAACCAAACCUAU |
| siRNA 837 | 837 | UAGGUUUGGUUUCUCUCUG | 6327 | CAGAGAGAAACCAAACCUA |
| siRNA 838 | 838 | AGGUUUGGUUUCUCUCUGU | 6328 | ACAGAGAGAAACCAAACCU |
| siRNA 839 | 839 | GGUUUGGUUUCUCUCUGUG | 6329 | CACAGAGAGAAACCAAACC |
| siRNA 840 | 840 | GUUUGGUUUCUCUCUGUGA | 6330 | UCACAGAGAGAAACCAAAC |
| siRNA 841 | 841 | UUUGGUUUCUCUCUGUGAA | 6331 | UUCACAGAGAGAAACCAAA |
| siRNA 842 | 842 | UUGGUUUCUCUCUGUGAAG | 6332 | CUUCACAGAGAGAAACCAA |
| siRNA 843 | 843 | UGGUUUCUCUCUGUGAAGA | 6333 | UCUUCACAGAGAGAAACCA |
| siRNA 844 | 844 | GGUUUCUCUCUGUGAAGAU | 6334 | AUCUUCACAGAGAGAAACC |
| siRNA 845 | 845 | GUUUCUCUCUGUGAAGAUG | 6335 | CAUCUUCACAGAGAGAAAC |
| siRNA 846 | 846 | UUUCUCUCUGUGAAGAUGA | 6336 | UCAUCUUCACAGAGAGAAA |
| siRNA 847 | 847 | UUCUCUCUGUGAAGAUGAA | 6337 | UUCAUCUUCACAGAGAGAA |
| siRNA 848 | 848 | UCUCUCUGUGAAGAUGAAC | 6338 | GUUCAUCUUCACAGAGAGA |
| siRNA 849 | 849 | CUCUCUGUGAAGAUGAACC | 6339 | GGUUCAUCUUCACAGAGAG |
| siRNA 850 | 850 | UCUCUGUGAAGAUGAACCU | 6340 | AGGUUCAUCUUCACAGAGA |
| siRNA 851 | 851 | CUCUGUGAAGAUGAACCUA | 6341 | UAGGUUCAUCUUCACAGAG |
| siRNA 852 | 852 | UCUGUGAAGAUGAACCUAG | 6342 | CUAGGUUCAUCUUCACAGA |
| siRNA 853 | 853 | CUGUGAAGAUGAACCUAGU | 6343 | ACUAGGUUCAUCUUCACAG |
| siRNA 854 | 854 | UGUGAAGAUGAACCUAGUU | 6344 | AACUAGGUUCAUCUUCACA |
| siRNA 855 | 855 | GUGAAGAUGAACCUAGUUC | 6345 | GAACUAGGUUCAUCUUCAC |
| siRNA 856 | 856 | UGAAGAUGAACCUAGUUCU | 6346 | AGAACUAGGUUCAUCUUCA |
| siRNA 857 | 857 | GAAGAUGAACCUAGUUCUU | 6347 | AAGAACUAGGUUCAUCUUC |
| siRNA 858 | 858 | AAGAUGAACCUAGUUCUUC | 6348 | GAAGAACUAGGUUCAUCUU |
| siRNA 859 | 859 | AGAUGAACCUAGUUCUUCU | 6349 | AGAAGAACUAGGUUCAUCU |
| siRNA 860 | 860 | GAUGAACCUAGUUCUUCUG | 6350 | CAGAAGAACUAGGUUCAUC |
| siRNA 861 | 861 | AUGAACCUAGUUCUUCUGG | 6351 | CCAGAAGAACUAGGUUCAU |
| siRNA 862 | 862 | UGAACCUAGUUCUUCUGGU | 6352 | ACCAGAAGAACUAGGUUCA |
| siRNA 863 | 863 | GAACCUAGUUCUUCUGGUG | 6353 | CACCAGAAGAACUAGGUUC |
| siRNA 864 | 864 | AACCUAGUUCUUCUGGUGA | 6354 | UCACCAGAAGAACUAGGUU |
| siRNA 865 | 865 | ACCUAGUUCUUCUGGUGAA | 6355 | UUCACCAGAAGAACUAGGU |
| siRNA 866 | 866 | CCUAGUUCUUCUGGUGAAU | 6356 | AUUCACCAGAAGAACUAGG |
| siRNA 867 | 867 | CUAGUUCUUCUGGUGAAUU | 6357 | AAUUCACCAGAAGAACUAG |
| siRNA 868 | 868 | UAGUUCUUCUGGUGAAUUA | 6358 | UAAUUCACCAGAAGAACUA |
| siRNA 869 | 869 | AGUUCUUCUGGUGAAUUAA | 6359 | UUAAUUCACCAGAAGAACU |
| siRNA 870 | 870 | GUUCUUCUGGUGAAUUAAA | 6360 | UUUAAUUCACCAGAAGAAC |
| siRNA 871 | 871 | UUCUUCUGGUGAAUUAAAC | 6361 | GUUUAAUUCACCAGAAGAA |
| siRNA 872 | 872 | UCUUCUGGUGAAUUAAACU | 6362 | AGUUUAAUUCACCAGAAGA |
| siRNA 873 | 873 | CUUCUGGUGAAUUAAACUA | 6363 | UAGUUUAAUUCACCAGAAG |
| siRNA 874 | 874 | UUCUGGUGAAUUAAACUAC | 6364 | GUAGUUUAAUUCACCAGAA |
| siRNA 875 | 875 | UCUGGUGAAUUAAACUACU | 6365 | AGUAGUUUAAUUCACCAGA |
| siRNA 876 | 876 | CUGGUGAAUUAAACUACUA | 6366 | UAGUAGUUUAAUUCACCAG |
| siRNA 877 | 877 | UGGUGAAUUAAACUACUAU | 6367 | AUAGUAGUUUAAUUCACCA |
| siRNA 878 | 878 | GGUGAAUUAAACUACUAUG | 6368 | CAUAGUAGUUUAAUUCACC |
| siRNA 879 | 879 | GUGAAUUAAACUACUAUGA | 6369 | UCAUAGUAGUUUAAUUCAC |
| siRNA 880 | 880 | UGAAUUAAACUACUAUGAU | 6370 | AUCAUAGUAGUUUAAUUCA |
| siRNA 881 | 881 | GAAUUAAACUACUAUGAUC | 6371 | GAUCAUAGUAGUUUAAUUC |
| siRNA 882 | 882 | AAUUAAACUACUAUGAUCU | 6372 | AGAUCAUAGUAGUUUAAUU |
| siRNA 883 | 883 | AUUAAACUACUAUGAUCUU | 6373 | AAGAUCAUAGUAGUUUAAU |
| siRNA 884 | 884 | UUAAACUACUAUGAUCUUG | 6374 | CAAGAUCAUAGUAGUUUAA |
| siRNA 885 | 885 | UAAACUACUAUGAUCUUGU | 6375 | ACAAGAUCAUAGUAGUUUA |
| siRNA 886 | 886 | AAACUACUAUGAUCUUGUC | 6376 | GACAAGAUCAUAGUAGUUU |
| siRNA 887 | 887 | AACUACUAUGAUCUUGUCA | 6377 | UGACAAGAUCAUAGUAGUU |
| siRNA 888 | 888 | ACUACUAUGAUCUUGUCAG | 6378 | CUGACAAGAUCAUAGUAGU |
| siRNA 889 | 889 | CUACUAUGAUCUUGUCAGA | 6379 | UCUGACAAGAUCAUAGUAG |
| siRNA 890 | 890 | UACUAUGAUCUUGUCAGAA | 6380 | UUCUGACAAGAUCAUAGUA |
| siRNA 891 | 891 | ACUAUGAUCUUGUCAGAAC | 6381 | GUUCUGACAAGAUCAUAGU |
| siRNA 892 | 892 | CUAUGAUCUUGUCAGAACU | 6382 | AGUUCUGACAAGAUCAUAG |
| siRNA 893 | 893 | UAUGAUCUUGUCAGAACUG | 6383 | CAGUUCUGACAAGAUCAUA |
| siRNA 894 | 894 | AUGAUCUUGUCAGAACUGA | 6384 | UCAGUUCUGACAAGAUCAU |
| siRNA 895 | 895 | UGAUCUUGUCAGAACUGAA | 6385 | UUCAGUUCUGACAAGAUCA |
| siRNA 896 | 896 | GAUCUUGUCAGAACUGAAA | 6386 | UUUCAGUUCUGACAAGAUC |
| siRNA 897 | 897 | AUCUUGUCAGAACUGAAAU | 6387 | AUUUCAGUUCUGACAAGAU |
| siRNA 898 | 898 | UCUUGUCAGAACUGAAAUC | 6388 | GAUUUCAGUUCUGACAAGA |
| siRNA 899 | 899 | CUUGUCAGAACUGAAAUCG | 6389 | CGAUUUCAGUUCUGACAAG |
| siRNA 900 | 900 | UUGUCAGAACUGAAAUCGC | 6390 | GCGAUUUCAGUUCUGACAA |
| siRNA 901 | 901 | UGUCAGAACUGAAAUCGCA | 6391 | UGCGAUUUCAGUUCUGACA |
| siRNA 902 | 902 | GUCAGAACUGAAAUCGCAG | 6392 | CUGCGAUUUCAGUUCUGAC |
| siRNA 903 | 903 | UCAGAACUGAAAUCGCAGA | 6393 | UCUGCGAUUUCAGUUCUGA |
| siRNA 904 | 904 | CAGAACUGAAAUCGCAGAA | 6394 | UUCUGCGAUUUCAGUUCUG |
| siRNA 905 | 905 | AGAACUGAAAUCGCAGAAG | 6395 | CUUCUGCGAUUUCAGUUCU |
| siRNA 906 | 906 | GAACUGAAAUCGCAGAAGA | 6396 | UCUUCUGCGAUUUCAGUUC |
| siRNA 907 | 907 | AACUGAAAUCGCAGAAGAA | 6397 | UUCUUCUGCGAUUUCAGUU |
| siRNA 908 | 908 | ACUGAAAUCGCAGAAGAAA | 6398 | UUUCUUCUGCGAUUUCAGU |
| siRNA 909 | 909 | CUGAAAUCGCAGAAGAAAG | 6399 | CUUUCUUCUGCGAUUUCAG |
| siRNA 910 | 910 | UGAAAUCGCAGAAGAAAGA | 6400 | UCUUUCUUCUGCGAUUUCA |
| siRNA 911 | 911 | GAAAUCGCAGAAGAAAGAC | 6401 | GUCUUUCUUCUGCGAUUUC |
| siRNA 912 | 912 | AAAUCGCAGAAGAAAGACA | 6402 | UGUCUUUCUUCUGCGAUUU |
| siRNA 913 | 913 | AAUCGCAGAAGAAAGACAG | 6403 | CUGUCUUUCUUCUGCGAUU |
| siRNA 914 | 914 | AUCGCAGAAGAAAGACAGU | 6404 | ACUGUCUUUCUUCUGCGAU |
| siRNA 915 | 915 | UCGCAGAAGAAAGACAGUA | 6405 | UACUGUCUUUCUUCUGCGA |
| siRNA 916 | 916 | CGCAGAAGAAAGACAGUAU | 6406 | AUACUGUCUUUCUUCUGCG |
| siRNA 917 | 917 | GCAGAAGAAAGACAGUAUC | 6407 | GAUACUGUCUUUCUUCUGC |
| siRNA 918 | 918 | CAGAAGAAAGACAGUAUCU | 6408 | AGAUACUGUCUUUCUUCUG |
| siRNA 919 | 919 | AGAAGAAAGACAGUAUCUA | 6409 | UAGAUACUGUCUUUCUUCU |
| siRNA 920 | 920 | GAAGAAAGACAGUAUCUAC | 6410 | GUAGAUACUGUCUUUCUUC |
| siRNA 921 | 921 | AAGAAAGACAGUAUCUACG | 6411 | CGUAGAUACUGUCUUUCUU |
| siRNA 922 | 922 | AGAAAGACAGUAUCUACGG | 6412 | CCGUAGAUACUGUCUUUCU |
| siRNA 923 | 923 | GAAAGACAGUAUCUACGGG | 6413 | CCCGUAGAUACUGUCUUUC |
| siRNA 924 | 924 | AAAGACAGUAUCUACGGGA | 6414 | UCCCGUAGAUACUGUCUUU |
| siRNA 925 | 925 | AAGACAGUAUCUACGGGAA | 6415 | UUCCCGUAGAUACUGUCUU |
| siRNA 926 | 926 | AGACAGUAUCUACGGGAAU | 6416 | AUUCCCGUAGAUACUGUCU |
| siRNA 927 | 927 | GACAGUAUCUACGGGAAUU | 6417 | AAUUCCCGUAGAUACUGUC |
| siRNA 928 | 928 | ACAGUAUCUACGGGAAUUA | 6418 | UAAUUCCCGUAGAUACUGU |
| siRNA 929 | 929 | CAGUAUCUACGGGAAUUAA | 6419 | UUAAUUCCCGUAGAUACUG |
| siRNA 930 | 930 | AGUAUCUACGGGAAUUAAA | 6420 | UUUAAUUCCCGUAGAUACU |
| siRNA 931 | 931 | GUAUCUACGGGAAUUAAAU | 6421 | AUUUAAUUCCCGUAGAUAC |
| siRNA 932 | 932 | UAUCUACGGGAAUUAAAUA | 6422 | UAUUUAAUUCCCGUAGAUA |
| siRNA 933 | 933 | AUCUACGGGAAUUAAAUAU | 6423 | AUAUUUAAUUCCCGUAGAU |
| siRNA 934 | 934 | UCUACGGGAAUUAAAUAUG | 6424 | CAUAUUUAAUUCCCGUAGA |
| siRNA 935 | 935 | CUACGGGAAUUAAAUAUGA | 6425 | UCAUAUUUAAUUCCCGUAG |
| siRNA 936 | 936 | UACGGGAAUUAAAUAUGAU | 6426 | AUCAUAUUUAAUUCCCGUA |
| siRNA 937 | 937 | ACGGGAAUUAAAUAUGAUC | 6427 | GAUCAUAUUUAAUUCCCGU |
| siRNA 938 | 938 | CGGGAAUUAAAUAUGAUCA | 6428 | UGAUCAUAUUUAAUUCCCG |
| siRNA 939 | 939 | GGGAAUUAAAUAUGAUCAU | 6429 | AUGAUCAUAUUUAAUUCCC |
| siRNA 940 | 940 | GGAAUUAAAUAUGAUCAUA | 6430 | UAUGAUCAUAUUUAAUUCC |
| siRNA 941 | 941 | GAAUUAAAUAUGAUCAUAA | 6431 | UUAUGAUCAUAUUUAAUUC |
| siRNA 942 | 942 | AAUUAAAUAUGAUCAUAAA | 6432 | UUUAUGAUCAUAUUUAAUU |
| siRNA 943 | 943 | AUUAAAUAUGAUCAUAAAA | 6433 | UUUUAUGAUCAUAUUUAAU |
| siRNA 944 | 944 | UUAAAUAUGAUCAUAAAAG | 6434 | CUUUUAUGAUCAUAUUUAA |
| siRNA 945 | 945 | UAAAUAUGAUCAUAAAAGU | 6435 | ACUUUUAUGAUCAUAUUUA |
| siRNA 946 | 946 | AAAUAUGAUCAUAAAAGUG | 6436 | CACUUUUAUGAUCAUAUUU |
| siRNA 947 | 947 | AAUAUGAUCAUAAAAGUGU | 6437 | ACACUUUUAUGAUCAUAUU |
| siRNA 948 | 948 | AUAUGAUCAUAAAAGUGUU | 6438 | AACACUUUUAUGAUCAUAU |
| siRNA 949 | 949 | UAUGAUCAUAAAAGUGUUU | 6439 | AAACACUUUUAUGAUCAUA |
| siRNA 950 | 950 | AUGAUCAUAAAAGUGUUUC | 6440 | GAAACACUUUUAUGAUCAU |
| siRNA 951 | 951 | UGAUCAUAAAAGUGUUUCG | 6441 | CGAAACACUUUUAUGAUCA |
| siRNA 952 | 952 | GAUCAUAAAAGUGUUUCGA | 6442 | UCGAAACACUUUUAUGAUC |
| siRNA 953 | 953 | AUCAUAAAAGUGUUUCGAG | 6443 | CUCGAAACACUUUUAUGAU |
| siRNA 954 | 954 | UCAUAAAAGUGUUUCGAGA | 6444 | UCUCGAAACACUUUUAUGA |
| siRNA 955 | 955 | CAUAAAAGUGUUUCGAGAA | 6445 | UUCUCGAAACACUUUUAUG |
| siRNA 956 | 956 | AUAAAAGUGUUUCGAGAAG | 6446 | CUUCUCGAAACACUUUUAU |
| siRNA 957 | 957 | UAAAAGUGUUUCGAGAAGC | 6447 | GCUUCUCGAAACACUUUUA |
| siRNA 958 | 958 | AAAAGUGUUUCGAGAAGCC | 6448 | GGCUUCUCGAAACACUUUU |
| siRNA 959 | 959 | AAAGUGUUUCGAGAAGCCU | 6449 | AGGCUUCUCGAAACACUUU |
| siRNA 960 | 960 | AAGUGUUUCGAGAAGCCUU | 6450 | AAGGCUUCUCGAAACACUU |
| siRNA 961 | 961 | AGUGUUUCGAGAAGCCUUU | 6451 | AAAGGCUUCUCGAAACACU |
| siRNA 962 | 962 | GUGUUUCGAGAAGCCUUUC | 6452 | GAAAGGCUUCUCGAAACAC |
| siRNA 963 | 963 | UGUUUCGAGAAGCCUUUCU | 6453 | AGAAAGGCUUCUCGAAACA |
| siRNA 964 | 964 | GUUUCGAGAAGCCUUUCUU | 6454 | AAGAAAGGCUUCUCGAAAC |
| siRNA 965 | 965 | UUUCGAGAAGCCUUUCUUU | 6455 | AAAGAAAGGCUUCUCGAAA |
| siRNA 966 | 966 | UUCGAGAAGCCUUUCUUUC | 6456 | GAAAGAAAGGCUUCUCGAA |
| siRNA 967 | 967 | UCGAGAAGCCUUUCUUUCU | 6457 | AGAAAGAAAGGCUUCUCGA |
| siRNA 968 | 968 | CGAGAAGCCUUUCUUUCUG | 6458 | CAGAAAGAAAGGCUUCUCG |
| siRNA 969 | 969 | GAGAAGCCUUUCUUUCUGA | 6459 | UCAGAAAGAAAGGCUUCUC |
| siRNA 970 | 970 | AGAAGCCUUUCUUUCUGAU | 6460 | AUCAGAAAGAAAGGCUUCU |
| siRNA 971 | 971 | GAAGCCUUUCUUUCUGAUA | 6461 | UAUCAGAAAGAAAGGCUUC |
| siRNA 972 | 972 | AAGCCUUUCUUUCUGAUAG | 6462 | CUAUCAGAAAGAAAGGCUU |
| siRNA 973 | 973 | AGCCUUUCUUUCUGAUAGA | 6463 | UCUAUCAGAAAGAAAGGCU |
| siRNA 974 | 974 | GCCUUUCUUUCUGAUAGAA | 6464 | UUCUAUCAGAAAGAAAGGC |
| siRNA 975 | 975 | CCUUUCUUUCUGAUAGAAA | 6465 | UUUCUAUCAGAAAGAAAGG |
| siRNA 976 | 976 | CUUUCUUUCUGAUAGAAAG | 6466 | CUUUCUAUCAGAAAGAAAG |
| siRNA 977 | 977 | UUUCUUUCUGAUAGAAAGC | 6467 | GCUUUCUAUCAGAAAGAAA |
| siRNA 978 | 978 | UUCUUUCUGAUAGAAAGCU | 6468 | AGCUUUCUAUCAGAAAGAA |
| siRNA 979 | 979 | UCUUUCUGAUAGAAAGCUG | 6469 | CAGCUUUCUAUCAGAAAGA |
| siRNA 980 | 980 | CUUUCUGAUAGAAAGCUGU | 6470 | ACAGCUUUCUAUCAGAAAG |
| siRNA 981 | 981 | UUUCUGAUAGAAAGCUGUU | 6471 | AACAGCUUUCUAUCAGAAA |
| siRNA 982 | 982 | UUCUGAUAGAAAGCUGUUU | 6472 | AAACAGCUUUCUAUCAGAA |
| siRNA 983 | 983 | UCUGAUAGAAAGCUGUUUA | 6473 | UAAACAGCUUUCUAUCAGA |
| siRNA 984 | 984 | CUGAUAGAAAGCUGUUUAA | 6474 | UUAAACAGCUUUCUAUCAG |
| siRNA 985 | 985 | UGAUAGAAAGCUGUUUAAA | 6475 | UUUAAACAGCUUUCUAUCA |
| siRNA 986 | 986 | GAUAGAAAGCUGUUUAAAC | 6476 | GUUUAAACAGCUUUCUAUC |
| siRNA 987 | 987 | AUAGAAAGCUGUUUAAACC | 6477 | GGUUUAAACAGCUUUCUAU |
| siRNA 988 | 988 | UAGAAAGCUGUUUAAACCU | 6478 | AGGUUUAAACAGCUUUCUA |
| siRNA 989 | 989 | AGAAAGCUGUUUAAACCUU | 6479 | AAGGUUUAAACAGCUUUCU |
| siRNA 990 | 990 | GAAAGCUGUUUAAACCUUC | 6480 | GAAGGUUUAAACAGCUUUC |
| siRNA 991 | 991 | AAAGCUGUUUAAACCUUCU | 6481 | AGAAGGUUUAAACAGCUUU |
| siRNA 992 | 992 | AAGCUGUUUAAACCUUCUG | 6482 | CAGAAGGUUUAAACAGCUU |
| siRNA 993 | 993 | AGCUGUUUAAACCUUCUGA | 6483 | UCAGAAGGUUUAAACAGCU |
| siRNA 994 | 994 | GCUGUUUAAACCUUCUGAU | 6484 | AUCAGAAGGUUUAAACAGC |
| siRNA 995 | 995 | CUGUUUAAACCUUCUGAUA | 6485 | UAUCAGAAGGUUUAAACAG |
| siRNA 996 | 996 | UGUUUAAACCUUCUGAUAU | 6486 | AUAUCAGAAGGUUUAAACA |
| siRNA 997 | 997 | GUUUAAACCUUCUGAUAUC | 6487 | GAUAUCAGAAGGUUUAAAC |
| siRNA 998 | 998 | UUUAAACCUUCUGAUAUCG | 6488 | CGAUAUCAGAAGGUUUAAA |
| siRNA 999 | 999 | UUAAACCUUCUGAUAUCGA | 6489 | UCGAUAUCAGAAGGUUUAA |
| siRNA 1000 | 1000 | UAAACCUUCUGAUAUCGAA | 6490 | UUCGAUAUCAGAAGGUUUA |
| siRNA 1001 | 1001 | AAACCUUCUGAUAUCGAAA | 6491 | UUUCGAUAUCAGAAGGUUU |
| siRNA 1002 | 1002 | AACCUUCUGAUAUCGAAAA | 6492 | UUUUCGAUAUCAGAAGGUU |
| siRNA 1003 | 1003 | ACCUUCUGAUAUCGAAAAG | 6493 | CUUUUCGAUAUCAGAAGGU |
| siRNA 1004 | 1004 | CCUUCUGAUAUCGAAAAGA | 6494 | UCUUUUCGAUAUCAGAAGG |
| siRNA 1005 | 1005 | CUUCUGAUAUCGAAAAGAU | 6495 | AUCUUUUCGAUAUCAGAAG |
| siRNA 1006 | 1006 | UUCUGAUAUCGAAAAGAUU | 6496 | AAUCUUUUCGAUAUCAGAA |
| siRNA 1007 | 1007 | UCUGAUAUCGAAAAGAUUU | 6497 | AAAUCUUUUCGAUAUCAGA |
| siRNA 1008 | 1008 | CUGAUAUCGAAAAGAUUUU | 6498 | AAAAUCUUUUCGAUAUCAG |
| siRNA 1009 | 1009 | UGAUAUCGAAAAGAUUUUU | 6499 | AAAAAUCUUUUCGAUAUCA |
| siRNA 1010 | 1010 | GAUAUCGAAAAGAUUUUUA | 6500 | UAAAAAUCUUUUCGAUAUC |
| siRNA 1011 | 1011 | AUAUCGAAAAGAUUUUUAG | 6501 | CUAAAAAUCUUUUCGAUAU |
| siRNA 1012 | 1012 | UAUCGAAAAGAUUUUUAGU | 6502 | ACUAAAAAUCUUUUCGAUA |
| siRNA 1013 | 1013 | AUCGAAAAGAUUUUUAGUA | 6503 | UACUAAAAAUCUUUUCGAU |
| siRNA 1014 | 1014 | UCGAAAAGAUUUUUAGUAA | 6504 | UUACUAAAAAUCUUUUCGA |
| siRNA 1015 | 1015 | CGAAAAGAUUUUUAGUAAC | 6505 | GUUACUAAAAAUCUUUUCG |
| siRNA 1016 | 1016 | GAAAAGAUUUUUAGUAACA | 6506 | UGUUACUAAAAAUCUUUUC |
| siRNA 1017 | 1017 | AAAAGAUUUUUAGUAACAU | 6507 | AUGUUACUAAAAAUCUUUU |
| siRNA 1018 | 1018 | AAAGAUUUUUAGUAACAUU | 6508 | AAUGUUACUAAAAAUCUUU |
| siRNA 1019 | 1019 | AAGAUUUUUAGUAACAUUU | 6509 | AAAUGUUACUAAAAAUCUU |
| siRNA 1020 | 1020 | AGAUUUUUAGUAACAUUUC | 6510 | GAAAUGUUACUAAAAAUCU |
| siRNA 1021 | 1021 | GAUUUUUAGUAACAUUUCA | 6511 | UGAAAUGUUACUAAAAAUC |
| siRNA 1022 | 1022 | AUUUUUAGUAACAUUUCAG | 6512 | CUGAAAUGUUACUAAAAAU |
| siRNA 1023 | 1023 | UUUUUAGUAACAUUUCAGA | 6513 | UCUGAAAUGUUACUAAAAA |
| siRNA 1024 | 1024 | UUUUAGUAACAUUUCAGAU | 6514 | AUCUGAAAUGUUACUAAAA |
| siRNA 1025 | 1025 | UUUAGUAACAUUUCAGAUA | 6515 | UAUCUGAAAUGUUACUAAA |
| siRNA 1026 | 1026 | UUAGUAACAUUUCAGAUAU | 6516 | AUAUCUGAAAUGUUACUAA |
| siRNA 1027 | 1027 | UAGUAACAUUUCAGAUAUA | 6517 | UAUAUCUGAAAUGUUACUA |
| siRNA 1028 | 1028 | AGUAACAUUUCAGAUAUAC | 6518 | GUAUAUCUGAAAUGUUACU |
| siRNA 1029 | 1029 | GUAACAUUUCAGAUAUACA | 6519 | UGUAUAUCUGAAAUGUUAC |
| siRNA 1030 | 1030 | UAACAUUUCAGAUAUACAU | 6520 | AUGUAUAUCUGAAAUGUUA |
| siRNA 1031 | 1031 | AACAUUUCAGAUAUACAUG | 6521 | CAUGUAUAUCUGAAAUGUU |
| siRNA 1032 | 1032 | ACAUUUCAGAUAUACAUGA | 6522 | UCAUGUAUAUCUGAAAUGU |
| siRNA 1033 | 1033 | CAUUUCAGAUAUACAUGAA | 6523 | UUCAUGUAUAUCUGAAAUG |
| siRNA 1034 | 1034 | AUUUCAGAUAUACAUGAAU | 6524 | AUUCAUGUAUAUCUGAAAU |
| siRNA 1035 | 1035 | UUUCAGAUAUACAUGAAUU | 6525 | AAUUCAUGUAUAUCUGAAA |
| siRNA 1036 | 1036 | UUCAGAUAUACAUGAAUUG | 6526 | CAAUUCAUGUAUAUCUGAA |
| siRNA 1037 | 1037 | UCAGAUAUACAUGAAUUGA | 6527 | UCAAUUCAUGUAUAUCUGA |
| siRNA 1038 | 1038 | CAGAUAUACAUGAAUUGAC | 6528 | GUCAAUUCAUGUAUAUCUG |
| siRNA 1039 | 1039 | AGAUAUACAUGAAUUGACU | 6529 | AGUCAAUUCAUGUAUAUCU |
| siRNA 1040 | 1040 | GAUAUACAUGAAUUGACUG | 6530 | CAGUCAAUUCAUGUAUAUC |
| siRNA 1041 | 1041 | AUAUACAUGAAUUGACUGU | 6531 | ACAGUCAAUUCAUGUAUAU |
| siRNA 1042 | 1042 | UAUACAUGAAUUGACUGUG | 6532 | CACAGUCAAUUCAUGUAUA |
| siRNA 1043 | 1043 | AUACAUGAAUUGACUGUGA | 6533 | UCACAGUCAAUUCAUGUAU |
| siRNA 1044 | 1044 | UACAUGAAUUGACUGUGAA | 6534 | UUCACAGUCAAUUCAUGUA |
| siRNA 1045 | 1045 | ACAUGAAUUGACUGUGAAA | 6535 | UUUCACAGUCAAUUCAUGU |
| siRNA 1046 | 1046 | CAUGAAUUGACUGUGAAAC | 6536 | GUUUCACAGUCAAUUCAUG |
| siRNA 1047 | 1047 | AUGAAUUGACUGUGAAACU | 6537 | AGUUUCACAGUCAAUUCAU |
| siRNA 1048 | 1048 | UGAAUUGACUGUGAAACUU | 6538 | AAGUUUCACAGUCAAUUCA |
| siRNA 1049 | 1049 | GAAUUGACUGUGAAACUUU | 6539 | AAAGUUUCACAGUCAAUUC |
| siRNA 1050 | 1050 | AAUUGACUGUGAAACUUUU | 6540 | AAAAGUUUCACAGUCAAUU |
| siRNA 1051 | 1051 | AUUGACUGUGAAACUUUUA | 6541 | UAAAAGUUUCACAGUCAAU |
| siRNA 1052 | 1052 | UUGACUGUGAAACUUUUAG | 6542 | CUAAAAGUUUCACAGUCAA |
| siRNA 1053 | 1053 | UGACUGUGAAACUUUUAGG | 6543 | CCUAAAAGUUUCACAGUCA |
| siRNA 1054 | 1054 | GACUGUGAAACUUUUAGGU | 6544 | ACCUAAAAGUUUCACAGUC |
| siRNA 1055 | 1055 | ACUGUGAAACUUUUAGGUU | 6545 | AACCUAAAAGUUUCACAGU |
| siRNA 1056 | 1056 | CUGUGAAACUUUUAGGUUU | 6546 | AAACCUAAAAGUUUCACAG |
| siRNA 1057 | 1057 | UGUGAAACUUUUAGGUUUG | 6547 | CAAACCUAAAAGUUUCACA |
| siRNA 1058 | 1058 | GUGAAACUUUUAGGUUUGA | 6548 | UCAAACCUAAAAGUUUCAC |
| siRNA 1059 | 1059 | UGAAACUUUUAGGUUUGAU | 6549 | AUCAAACCUAAAAGUUUCA |
| siRNA 1060 | 1060 | GAAACUUUUAGGUUUGAUU | 6550 | AAUCAAACCUAAAAGUUUC |
| siRNA 1061 | 1061 | AAACUUUUAGGUUUGAUUG | 6551 | CAAUCAAACCUAAAAGUUU |
| siRNA 1062 | 1062 | AACUUUUAGGUUUGAUUGA | 6552 | UCAAUCAAACCUAAAAGUU |
| siRNA 1063 | 1063 | ACUUUUAGGUUUGAUUGAA | 6553 | UUCAAUCAAACCUAAAAGU |
| siRNA 1064 | 1064 | CUUUUAGGUUUGAUUGAAG | 6554 | CUUCAAUCAAACCUAAAAG |
| siRNA 1065 | 1065 | UUUUAGGUUUGAUUGAAGA | 6555 | UCUUCAAUCAAACCUAAAA |
| siRNA 1066 | 1066 | UUUAGGUUUGAUUGAAGAC | 6556 | GUCUUCAAUCAAACCUAAA |
| siRNA 1067 | 1067 | UUAGGUUUGAUUGAAGACA | 6557 | UGUCUUCAAUCAAACCUAA |
| siRNA 1068 | 1068 | UAGGUUUGAUUGAAGACAC | 6558 | GUGUCUUCAAUCAAACCUA |
| siRNA 1069 | 1069 | AGGUUUGAUUGAAGACACA | 6559 | UGUGUCUUCAAUCAAACCU |
| siRNA 1070 | 1070 | GGUUUGAUUGAAGACACAG | 6560 | CUGUGUCUUCAAUCAAACC |
| siRNA 1071 | 1071 | GUUUGAUUGAAGACACAGU | 6561 | ACUGUGUCUUCAAUCAAAC |
| siRNA 1072 | 1072 | UUUGAUUGAAGACACAGUU | 6562 | AACUGUGUCUUCAAUCAAA |
| siRNA 1073 | 1073 | UUGAUUGAAGACACAGUUG | 6563 | CAACUGUGUCUUCAAUCAA |
| siRNA 1074 | 1074 | UGAUUGAAGACACAGUUGA | 6564 | UCAACUGUGUCUUCAAUCA |
| siRNA 1075 | 1075 | GAUUGAAGACACAGUUGAA | 6565 | UUCAACUGUGUCUUCAAUC |
| siRNA 1076 | 1076 | AUUGAAGACACAGUUGAAA | 6566 | UUUCAACUGUGUCUUCAAU |
| siRNA 1077 | 1077 | UUGAAGACACAGUUGAAAU | 6567 | AUUUCAACUGUGUCUUCAA |
| siRNA 1078 | 1078 | UGAAGACACAGUUGAAAUG | 6568 | CAUUUCAACUGUGUCUUCA |
| siRNA 1079 | 1079 | GAAGACACAGUUGAAAUGA | 6569 | UCAUUUCAACUGUGUCUUC |
| siRNA 1080 | 1080 | AAGACACAGUUGAAAUGAC | 6570 | GUCAUUUCAACUGUGUCUU |
| siRNA 1081 | 1081 | AGACACAGUUGAAAUGACU | 6571 | AGUCAUUUCAACUGUGUCU |
| siRNA 1082 | 1082 | GACACAGUUGAAAUGACUG | 6572 | CAGUCAUUUCAACUGUGUC |
| siRNA 1083 | 1083 | ACACAGUUGAAAUGACUGA | 6573 | UCAGUCAUUUCAACUGUGU |
| siRNA 1084 | 1084 | CACAGUUGAAAUGACUGAU | 6574 | AUCAGUCAUUUCAACUGUG |
| siRNA 1085 | 1085 | ACAGUUGAAAUGACUGAUG | 6575 | CAUCAGUCAUUUCAACUGU |
| siRNA 1086 | 1086 | CAGUUGAAAUGACUGAUGA | 6576 | UCAUCAGUCAUUUCAACUG |
| siRNA 1087 | 1087 | AGUUGAAAUGACUGAUGAA | 6577 | UUCAUCAGUCAUUUCAACU |
| siRNA 1088 | 1088 | GUUGAAAUGACUGAUGAAA | 6578 | UUUCAUCAGUCAUUUCAAC |
| siRNA 1089 | 1089 | UUGAAAUGACUGAUGAAAG | 6579 | CUUUCAUCAGUCAUUUCAA |
| siRNA 1090 | 1090 | UGAAAUGACUGAUGAAAGC | 6580 | GCUUUCAUCAGUCAUUUCA |
| siRNA 1091 | 1091 | GAAAUGACUGAUGAAAGCA | 6581 | UGCUUUCAUCAGUCAUUUC |
| siRNA 1092 | 1092 | AAAUGACUGAUGAAAGCAG | 6582 | CUGCUUUCAUCAGUCAUUU |
| siRNA 1093 | 1093 | AAUGACUGAUGAAAGCAGU | 6583 | ACUGCUUUCAUCAGUCAUU |
| siRNA 1094 | 1094 | AUGACUGAUGAAAGCAGUC | 6584 | GACUGCUUUCAUCAGUCAU |
| siRNA 1095 | 1095 | UGACUGAUGAAAGCAGUCC | 6585 | GGACUGCUUUCAUCAGUCA |
| siRNA 1096 | 1096 | GACUGAUGAAAGCAGUCCU | 6586 | AGGACUGCUUUCAUCAGUC |
| siRNA 1097 | 1097 | ACUGAUGAAAGCAGUCCUC | 6587 | GAGGACUGCUUUCAUCAGU |
| siRNA 1098 | 1098 | CUGAUGAAAGCAGUCCUCA | 6588 | UGAGGACUGCUUUCAUCAG |
| siRNA 1099 | 1099 | UGAUGAAAGCAGUCCUCAU | 6589 | AUGAGGACUGCUUUCAUCA |
| siRNA 1100 | 1100 | GAUGAAAGCAGUCCUCAUC | 6590 | GAUGAGGACUGCUUUCAUC |
| siRNA 1101 | 1101 | AUGAAAGCAGUCCUCAUCC | 6591 | GGAUGAGGACUGCUUUCAU |
| siRNA 1102 | 1102 | UGAAAGCAGUCCUCAUCCC | 6592 | GGGAUGAGGACUGCUUUCA |
| siRNA 1103 | 1103 | GAAAGCAGUCCUCAUCCCU | 6593 | AGGGAUGAGGACUGCUUUC |
| siRNA 1104 | 1104 | AAAGCAGUCCUCAUCCCUU | 6594 | AAGGGAUGAGGACUGCUUU |
| siRNA 1105 | 1105 | AAGCAGUCCUCAUCCCUUA | 6595 | UAAGGGAUGAGGACUGCUU |
| siRNA 1106 | 1106 | AGCAGUCCUCAUCCCUUAG | 6596 | CUAAGGGAUGAGGACUGCU |
| siRNA 1107 | 1107 | GCAGUCCUCAUCCCUUAGC | 6597 | GCUAAGGGAUGAGGACUGC |
| siRNA 1108 | 1108 | CAGUCCUCAUCCCUUAGCU | 6598 | AGCUAAGGGAUGAGGACUG |
| siRNA 1109 | 1109 | AGUCCUCAUCCCUUAGCUG | 6599 | CAGCUAAGGGAUGAGGACU |
| siRNA 1110 | 1110 | GUCCUCAUCCCUUAGCUGG | 6600 | CCAGCUAAGGGAUGAGGAC |
| siRNA 1111 | 1111 | UCCUCAUCCCUUAGCUGGC | 6601 | GCCAGCUAAGGGAUGAGGA |
| siRNA 1112 | 1112 | CCUCAUCCCUUAGCUGGCA | 6602 | UGCCAGCUAAGGGAUGAGG |
| siRNA 1113 | 1113 | CUCAUCCCUUAGCUGGCAG | 6603 | CUGCCAGCUAAGGGAUGAG |
| siRNA 1114 | 1114 | UCAUCCCUUAGCUGGCAGC | 6604 | GCUGCCAGCUAAGGGAUGA |
| siRNA 1115 | 1115 | CAUCCCUUAGCUGGCAGCU | 6605 | AGCUGCCAGCUAAGGGAUG |
| siRNA 1116 | 1116 | AUCCCUUAGCUGGCAGCUG | 6606 | CAGCUGCCAGCUAAGGGAU |
| siRNA 1117 | 1117 | UCCCUUAGCUGGCAGCUGU | 6607 | ACAGCUGCCAGCUAAGGGA |
| siRNA 1118 | 1118 | CCCUUAGCUGGCAGCUGUU | 6608 | AACAGCUGCCAGCUAAGGG |
| siRNA 1119 | 1119 | CCUUAGCUGGCAGCUGUUU | 6609 | AAACAGCUGCCAGCUAAGG |
| siRNA 1120 | 1120 | CUUAGCUGGCAGCUGUUUU | 6610 | AAAACAGCUGCCAGCUAAG |
| siRNA 1121 | 1121 | UUAGCUGGCAGCUGUUUUG | 6611 | CAAAACAGCUGCCAGCUAA |
| siRNA 1122 | 1122 | UAGCUGGCAGCUGUUUUGA | 6612 | UCAAAACAGCUGCCAGCUA |
| siRNA 1123 | 1123 | AGCUGGCAGCUGUUUUGAA | 6613 | UUCAAAACAGCUGCCAGCU |
| siRNA 1124 | 1124 | GCUGGCAGCUGUUUUGAAG | 6614 | CUUCAAAACAGCUGCCAGC |
| siRNA 1125 | 1125 | CUGGCAGCUGUUUUGAAGA | 6615 | UCUUCAAAACAGCUGCCAG |
| siRNA 1126 | 1126 | UGGCAGCUGUUUUGAAGAU | 6616 | AUCUUCAAAACAGCUGCCA |
| siRNA 1127 | 1127 | GGCAGCUGUUUUGAAGAUU | 6617 | AAUCUUCAAAACAGCUGCC |
| siRNA 1128 | 1128 | GCAGCUGUUUUGAAGAUUU | 6618 | AAAUCUUCAAAACAGCUGC |
| siRNA 1129 | 1129 | CAGCUGUUUUGAAGAUUUG | 6619 | CAAAUCUUCAAAACAGCUG |
| siRNA 1130 | 1130 | AGCUGUUUUGAAGAUUUGG | 6620 | CCAAAUCUUCAAAACAGCU |
| siRNA 1131 | 1131 | GCUGUUUUGAAGAUUUGGC | 6621 | GCCAAAUCUUCAAAACAGC |
| siRNA 1132 | 1132 | CUGUUUUGAAGAUUUGGCA | 6622 | UGCCAAAUCUUCAAAACAG |
| siRNA 1133 | 1133 | UGUUUUGAAGAUUUGGCAG | 6623 | CUGCCAAAUCUUCAAAACA |
| siRNA 1134 | 1134 | GUUUUGAAGAUUUGGCAGA | 6624 | UCUGCCAAAUCUUCAAAAC |
| siRNA 1135 | 1135 | UUUUGAAGAUUUGGCAGAA | 6625 | UUCUGCCAAAUCUUCAAAA |
| siRNA 1136 | 1136 | UUUGAAGAUUUGGCAGAAG | 6626 | CUUCUGCCAAAUCUUCAAA |
| siRNA 1137 | 1137 | UUGAAGAUUUGGCAGAAGA | 6627 | UCUUCUGCCAAAUCUUCAA |
| siRNA 1138 | 1138 | UGAAGAUUUGGCAGAAGAG | 6628 | CUCUUCUGCCAAAUCUUCA |
| siRNA 1139 | 1139 | GAAGAUUUGGCAGAAGAGC | 6629 | GCUCUUCUGCCAAAUCUUC |
| siRNA 1140 | 1140 | AAGAUUUGGCAGAAGAGCA | 6630 | UGCUCUUCUGCCAAAUCUU |
| siRNA 1141 | 1141 | AGAUUUGGCAGAAGAGCAA | 6631 | UUGCUCUUCUGCCAAAUCU |
| siRNA 1142 | 1142 | GAUUUGGCAGAAGAGCAAG | 6632 | CUUGCUCUUCUGCCAAAUC |
| siRNA 1143 | 1143 | AUUUGGCAGAAGAGCAAGC | 6633 | GCUUGCUCUUCUGCCAAAU |
| siRNA 1144 | 1144 | UUUGGCAGAAGAGCAAGCA | 6634 | UGCUUGCUCUUCUGCCAAA |
| siRNA 1145 | 1145 | UUGGCAGAAGAGCAAGCAU | 6635 | AUGCUUGCUCUUCUGCCAA |
| siRNA 1146 | 1146 | UGGCAGAAGAGCAAGCAUU | 6636 | AAUGCUUGCUCUUCUGCCA |
| siRNA 1147 | 1147 | GGCAGAAGAGCAAGCAUUU | 6637 | AAAUGCUUGCUCUUCUGCC |
| siRNA 1148 | 1148 | GCAGAAGAGCAAGCAUUUG | 6638 | CAAAUGCUUGCUCUUCUGC |
| siRNA 1149 | 1149 | CAGAAGAGCAAGCAUUUGA | 6639 | UCAAAUGCUUGCUCUUCUG |
| siRNA 1150 | 1150 | AGAAGAGCAAGCAUUUGAU | 6640 | AUCAAAUGCUUGCUCUUCU |
| siRNA 1151 | 1151 | GAAGAGCAAGCAUUUGAUC | 6641 | GAUCAAAUGCUUGCUCUUC |
| siRNA 1152 | 1152 | AAGAGCAAGCAUUUGAUCC | 6642 | GGAUCAAAUGCUUGCUCUU |
| siRNA 1153 | 1153 | AGAGCAAGCAUUUGAUCCU | 6643 | AGGAUCAAAUGCUUGCUCU |
| siRNA 1154 | 1154 | GAGCAAGCAUUUGAUCCUU | 6644 | AAGGAUCAAAUGCUUGCUC |
| siRNA 1155 | 1155 | AGCAAGCAUUUGAUCCUUA | 6645 | UAAGGAUCAAAUGCUUGCU |
| siRNA 1156 | 1156 | GCAAGCAUUUGAUCCUUAU | 6646 | AUAAGGAUCAAAUGCUUGC |
| siRNA 1157 | 1157 | CAAGCAUUUGAUCCUUAUG | 6647 | CAUAAGGAUCAAAUGCUUG |
| siRNA 1158 | 1158 | AAGCAUUUGAUCCUUAUGA | 6648 | UCAUAAGGAUCAAAUGCUU |
| siRNA 1159 | 1159 | AGCAUUUGAUCCUUAUGAA | 6649 | UUCAUAAGGAUCAAAUGCU |
| siRNA 1160 | 1160 | GCAUUUGAUCCUUAUGAAA | 6650 | UUUCAUAAGGAUCAAAUGC |
| siRNA 1161 | 1161 | CAUUUGAUCCUUAUGAAAC | 6651 | GUUUCAUAAGGAUCAAAUG |
| siRNA 1162 | 1162 | AUUUGAUCCUUAUGAAACA | 6652 | UGUUUCAUAAGGAUCAAAU |
| siRNA 1163 | 1163 | UUUGAUCCUUAUGAAACAU | 6653 | AUGUUUCAUAAGGAUCAAA |
| siRNA 1164 | 1164 | UUGAUCCUUAUGAAACAUU | 6654 | AAUGUUUCAUAAGGAUCAA |
| siRNA 1165 | 1165 | UGAUCCUUAUGAAACAUUA | 6655 | UAAUGUUUCAUAAGGAUCA |
| siRNA 1166 | 1166 | GAUCCUUAUGAAACAUUAU | 6656 | AUAAUGUUUCAUAAGGAUC |
| siRNA 1167 | 1167 | AUCCUUAUGAAACAUUAUC | 6657 | GAUAAUGUUUCAUAAGGAU |
| siRNA 1168 | 1168 | UCCUUAUGAAACAUUAUCA | 6658 | UGAUAAUGUUUCAUAAGGA |
| siRNA 1169 | 1169 | CCUUAUGAAACAUUAUCAC | 6659 | GUGAUAAUGUUUCAUAAGG |
| siRNA 1170 | 1170 | CUUAUGAAACAUUAUCACA | 6660 | UGUGAUAAUGUUUCAUAAG |
| siRNA 1171 | 1171 | UUAUGAAACAUUAUCACAG | 6661 | CUGUGAUAAUGUUUCAUAA |
| siRNA 1172 | 1172 | UAUGAAACAUUAUCACAGG | 6662 | CCUGUGAUAAUGUUUCAUA |
| siRNA 1173 | 1173 | AUGAAACAUUAUCACAGGA | 6663 | UCCUGUGAUAAUGUUUCAU |
| siRNA 1174 | 1174 | UGAAACAUUAUCACAGGAC | 6664 | GUCCUGUGAUAAUGUUUCA |
| siRNA 1175 | 1175 | GAAACAUUAUCACAGGACA | 6665 | UGUCCUGUGAUAAUGUUUC |
| siRNA 1176 | 1176 | AAACAUUAUCACAGGACAU | 6666 | AUGUCCUGUGAUAAUGUUU |
| siRNA 1177 | 1177 | AACAUUAUCACAGGACAUU | 6667 | AAUGUCCUGUGAUAAUGUU |
| siRNA 1178 | 1178 | ACAUUAUCACAGGACAUUC | 6668 | GAAUGUCCUGUGAUAAUGU |
| siRNA 1179 | 1179 | CAUUAUCACAGGACAUUCU | 6669 | AGAAUGUCCUGUGAUAAUG |
| siRNA 1180 | 1180 | AUUAUCACAGGACAUUCUU | 6670 | AAGAAUGUCCUGUGAUAAU |
| siRNA 1181 | 1181 | UUAUCACAGGACAUUCUUU | 6671 | AAAGAAUGUCCUGUGAUAA |
| siRNA 1182 | 1182 | UAUCACAGGACAUUCUUUC | 6672 | GAAAGAAUGUCCUGUGAUA |
| siRNA 1183 | 1183 | AUCACAGGACAUUCUUUCA | 6673 | UGAAAGAAUGUCCUGUGAU |
| siRNA 1184 | 1184 | UCACAGGACAUUCUUUCAC | 6674 | GUGAAAGAAUGUCCUGUGA |
| siRNA 1185 | 1185 | CACAGGACAUUCUUUCACC | 6675 | GGUGAAAGAAUGUCCUGUG |
| siRNA 1186 | 1186 | ACAGGACAUUCUUUCACCA | 6676 | UGGUGAAAGAAUGUCCUGU |
| siRNA 1187 | 1187 | CAGGACAUUCUUUCACCAG | 6677 | CUGGUGAAAGAAUGUCCUG |
| siRNA 1188 | 1188 | AGGACAUUCUUUCACCAGA | 6678 | UCUGGUGAAAGAAUGUCCU |
| siRNA 1189 | 1189 | GGACAUUCUUUCACCAGAG | 6679 | CUCUGGUGAAAGAAUGUCC |
| siRNA 1190 | 1190 | GACAUUCUUUCACCAGAGU | 6680 | ACUCUGGUGAAAGAAUGUC |
| siRNA 1191 | 1191 | ACAUUCUUUCACCAGAGUU | 6681 | AACUCUGGUGAAAGAAUGU |
| siRNA 1192 | 1192 | CAUUCUUUCACCAGAGUUU | 6682 | AAACUCUGGUGAAAGAAUG |
| siRNA 1193 | 1193 | AUUCUUUCACCAGAGUUUC | 6683 | GAAACUCUGGUGAAAGAAU |
| siRNA 1194 | 1194 | UUCUUUCACCAGAGUUUCA | 6684 | UGAAACUCUGGUGAAAGAA |
| siRNA 1195 | 1195 | UCUUUCACCAGAGUUUCAU | 6685 | AUGAAACUCUGGUGAAAGA |
| siRNA 1196 | 1196 | CUUUCACCAGAGUUUCAUG | 6686 | CAUGAAACUCUGGUGAAAG |
| siRNA 1197 | 1197 | UUUCACCAGAGUUUCAUGA | 6687 | UCAUGAAACUCUGGUGAAA |
| siRNA 1198 | 1198 | UUCACCAGAGUUUCAUGAA | 6688 | UUCAUGAAACUCUGGUGAA |
| siRNA 1199 | 1199 | UCACCAGAGUUUCAUGAAC | 6689 | GUUCAUGAAACUCUGGUGA |
| siRNA 1200 | 1200 | CACCAGAGUUUCAUGAACA | 6690 | UGUUCAUGAAACUCUGGUG |
| siRNA 1201 | 1201 | ACCAGAGUUUCAUGAACAU | 6691 | AUGUUCAUGAAACUCUGGU |
| siRNA 1202 | 1202 | CCAGAGUUUCAUGAACAUU | 6692 | AAUGUUCAUGAAACUCUGG |
| siRNA 1203 | 1203 | CAGAGUUUCAUGAACAUUU | 6693 | AAAUGUUCAUGAAACUCUG |
| siRNA 1204 | 1204 | AGAGUUUCAUGAACAUUUC | 6694 | GAAAUGUUCAUGAAACUCU |
| siRNA 1205 | 1205 | GAGUUUCAUGAACAUUUCA | 6695 | UGAAAUGUUCAUGAAACUC |
| siRNA 1206 | 1206 | AGUUUCAUGAACAUUUCAA | 6696 | UUGAAAUGUUCAUGAAACU |
| siRNA 1207 | 1207 | GUUUCAUGAACAUUUCAAU | 6697 | AUUGAAAUGUUCAUGAAAC |
| siRNA 1208 | 1208 | UUUCAUGAACAUUUCAAUA | 6698 | UAUUGAAAUGUUCAUGAAA |
| siRNA 1209 | 1209 | UUCAUGAACAUUUCAAUAA | 6699 | UUAUUGAAAUGUUCAUGAA |
| siRNA 1210 | 1210 | UCAUGAACAUUUCAAUAAA | 6700 | UUUAUUGAAAUGUUCAUGA |
| siRNA 1211 | 1211 | CAUGAACAUUUCAAUAAAU | 6701 | AUUUAUUGAAAUGUUCAUG |
| siRNA 1212 | 1212 | AUGAACAUUUCAAUAAAUU | 6702 | AAUUUAUUGAAAUGUUCAU |
| siRNA 1213 | 1213 | UGAACAUUUCAAUAAAUUG | 6703 | CAAUUUAUUGAAAUGUUCA |
| siRNA 1214 | 1214 | GAACAUUUCAAUAAAUUGA | 6704 | UCAAUUUAUUGAAAUGUUC |
| siRNA 1215 | 1215 | AACAUUUCAAUAAAUUGAU | 6705 | AUCAAUUUAUUGAAAUGUU |
| siRNA 1216 | 1216 | ACAUUUCAAUAAAUUGAUG | 6706 | CAUCAAUUUAUUGAAAUGU |
| siRNA 1217 | 1217 | CAUUUCAAUAAAUUGAUGG | 6707 | CCAUCAAUUUAUUGAAAUG |
| siRNA 1218 | 1218 | AUUUCAAUAAAUUGAUGGC | 6708 | GCCAUCAAUUUAUUGAAAU |
| siRNA 1219 | 1219 | UUUCAAUAAAUUGAUGGCC | 6709 | GGCCAUCAAUUUAUUGAAA |
| siRNA 1220 | 1220 | UUCAAUAAAUUGAUGGCCA | 6710 | UGGCCAUCAAUUUAUUGAA |
| siRNA 1221 | 1221 | UCAAUAAAUUGAUGGCCAG | 6711 | CUGGCCAUCAAUUUAUUGA |
| siRNA 1222 | 1222 | CAAUAAAUUGAUGGCCAGA | 6712 | UCUGGCCAUCAAUUUAUUG |
| siRNA 1223 | 1223 | AAUAAAUUGAUGGCCAGAC | 6713 | GUCUGGCCAUCAAUUUAUU |
| siRNA 1224 | 1224 | AUAAAUUGAUGGCCAGACC | 6714 | GGUCUGGCCAUCAAUUUAU |
| siRNA 1225 | 1225 | UAAAUUGAUGGCCAGACCU | 6715 | AGGUCUGGCCAUCAAUUUA |
| siRNA 1226 | 1226 | AAAUUGAUGGCCAGACCUG | 6716 | CAGGUCUGGCCAUCAAUUU |
| siRNA 1227 | 1227 | AAUUGAUGGCCAGACCUGC | 6717 | GCAGGUCUGGCCAUCAAUU |
| siRNA 1228 | 1228 | AUUGAUGGCCAGACCUGCA | 6718 | UGCAGGUCUGGCCAUCAAU |
| siRNA 1229 | 1229 | UUGAUGGCCAGACCUGCAG | 6719 | CUGCAGGUCUGGCCAUCAA |
| siRNA 1230 | 1230 | UGAUGGCCAGACCUGCAGU | 6720 | ACUGCAGGUCUGGCCAUCA |
| siRNA 1231 | 1231 | GAUGGCCAGACCUGCAGUU | 6721 | AACUGCAGGUCUGGCCAUC |
| siRNA 1232 | 1232 | AUGGCCAGACCUGCAGUUG | 6722 | CAACUGCAGGUCUGGCCAU |
| siRNA 1233 | 1233 | UGGCCAGACCUGCAGUUGC | 6723 | GCAACUGCAGGUCUGGCCA |
| siRNA 1234 | 1234 | GGCCAGACCUGCAGUUGCU | 6724 | AGCAACUGCAGGUCUGGCC |
| siRNA 1235 | 1235 | GCCAGACCUGCAGUUGCUC | 6725 | GAGCAACUGCAGGUCUGGC |
| siRNA 1236 | 1236 | CCAGACCUGCAGUUGCUCU | 6726 | AGAGCAACUGCAGGUCUGG |
| siRNA 1237 | 1237 | CAGACCUGCAGUUGCUCUA | 6727 | UAGAGCAACUGCAGGUCUG |
| siRNA 1238 | 1238 | AGACCUGCAGUUGCUCUAC | 6728 | GUAGAGCAACUGCAGGUCU |
| siRNA 1239 | 1239 | GACCUGCAGUUGCUCUACA | 6729 | UGUAGAGCAACUGCAGGUC |
| siRNA 1240 | 1240 | ACCUGCAGUUGCUCUACAC | 6730 | GUGUAGAGCAACUGCAGGU |
| siRNA 1241 | 1241 | CCUGCAGUUGCUCUACACU | 6731 | AGUGUAGAGCAACUGCAGG |
| siRNA 1242 | 1242 | CUGCAGUUGCUCUACACUU | 6732 | AAGUGUAGAGCAACUGCAG |
| siRNA 1243 | 1243 | UGCAGUUGCUCUACACUUU | 6733 | AAAGUGUAGAGCAACUGCA |
| siRNA 1244 | 1244 | GCAGUUGCUCUACACUUUC | 6734 | GAAAGUGUAGAGCAACUGC |
| siRNA 1245 | 1245 | CAGUUGCUCUACACUUUCA | 6735 | UGAAAGUGUAGAGCAACUG |
| siRNA 1246 | 1246 | AGUUGCUCUACACUUUCAG | 6736 | CUGAAAGUGUAGAGCAACU |
| siRNA 1247 | 1247 | GUUGCUCUACACUUUCAGU | 6737 | ACUGAAAGUGUAGAGCAAC |
| siRNA 1248 | 1248 | UUGCUCUACACUUUCAGUC | 6738 | GACUGAAAGUGUAGAGCAA |
| siRNA 1249 | 1249 | UGCUCUACACUUUCAGUCC | 6739 | GGACUGAAAGUGUAGAGCA |
| siRNA 1250 | 1250 | GCUCUACACUUUCAGUCCA | 6740 | UGGACUGAAAGUGUAGAGC |
| siRNA 1251 | 1251 | CUCUACACUUUCAGUCCAU | 6741 | AUGGACUGAAAGUGUAGAG |
| siRNA 1252 | 1252 | UCUACACUUUCAGUCCAUU | 6742 | AAUGGACUGAAAGUGUAGA |
| siRNA 1253 | 1253 | CUACACUUUCAGUCCAUUG | 6743 | CAAUGGACUGAAAGUGUAG |
| siRNA 1254 | 1254 | UACACUUUCAGUCCAUUGC | 6744 | GCAAUGGACUGAAAGUGUA |
| siRNA 1255 | 1255 | ACACUUUCAGUCCAUUGCU | 6745 | AGCAAUGGACUGAAAGUGU |
| siRNA 1256 | 1256 | CACUUUCAGUCCAUUGCUG | 6746 | CAGCAAUGGACUGAAAGUG |
| siRNA 1257 | 1257 | ACUUUCAGUCCAUUGCUGA | 6747 | UCAGCAAUGGACUGAAAGU |
| siRNA 1258 | 1258 | CUUUCAGUCCAUUGCUGAU | 6748 | AUCAGCAAUGGACUGAAAG |
| siRNA 1259 | 1259 | UUUCAGUCCAUUGCUGAUG | 6749 | CAUCAGCAAUGGACUGAAA |
| siRNA 1260 | 1260 | UUCAGUCCAUUGCUGAUGG | 6750 | CCAUCAGCAAUGGACUGAA |
| siRNA 1261 | 1261 | UCAGUCCAUUGCUGAUGGU | 6751 | ACCAUCAGCAAUGGACUGA |
| siRNA 1262 | 1262 | CAGUCCAUUGCUGAUGGUU | 6752 | AACCAUCAGCAAUGGACUG |
| siRNA 1263 | 1263 | AGUCCAUUGCUGAUGGUUU | 6753 | AAACCAUCAGCAAUGGACU |
| siRNA 1264 | 1264 | GUCCAUUGCUGAUGGUUUU | 6754 | AAAACCAUCAGCAAUGGAC |
| siRNA 1265 | 1265 | UCCAUUGCUGAUGGUUUUA | 6755 | UAAAACCAUCAGCAAUGGA |
| siRNA 1266 | 1266 | CCAUUGCUGAUGGUUUUAA | 6756 | UUAAAACCAUCAGCAAUGG |
| siRNA 1267 | 1267 | CAUUGCUGAUGGUUUUAAA | 6757 | UUUAAAACCAUCAGCAAUG |
| siRNA 1268 | 1268 | AUUGCUGAUGGUUUUAAAG | 6758 | CUUUAAAACCAUCAGCAAU |
| siRNA 1269 | 1269 | UUGCUGAUGGUUUUAAAGA | 6759 | UCUUUAAAACCAUCAGCAA |
| siRNA 1270 | 1270 | UGCUGAUGGUUUUAAAGAG | 6760 | CUCUUUAAAACCAUCAGCA |
| siRNA 1271 | 1271 | GCUGAUGGUUUUAAAGAGG | 6761 | CCUCUUUAAAACCAUCAGC |
| siRNA 1272 | 1272 | CUGAUGGUUUUAAAGAGGC | 6762 | GCCUCUUUAAAACCAUCAG |
| siRNA 1273 | 1273 | UGAUGGUUUUAAAGAGGCA | 6763 | UGCCUCUUUAAAACCAUCA |
| siRNA 1274 | 1274 | GAUGGUUUUAAAGAGGCAG | 6764 | CUGCCUCUUUAAAACCAUC |
| siRNA 1275 | 1275 | AUGGUUUUAAAGAGGCAGU | 6765 | ACUGCCUCUUUAAAACCAU |
| siRNA 1276 | 1276 | UGGUUUUAAAGAGGCAGUU | 6766 | AACUGCCUCUUUAAAACCA |
| siRNA 1277 | 1277 | GGUUUUAAAGAGGCAGUUC | 6767 | GAACUGCCUCUUUAAAACC |
| siRNA 1278 | 1278 | GUUUUAAAGAGGCAGUUCG | 6768 | CGAACUGCCUCUUUAAAAC |
| siRNA 1279 | 1279 | UUUUAAAGAGGCAGUUCGU | 6769 | ACGAACUGCCUCUUUAAAA |
| siRNA 1280 | 1280 | UUUAAAGAGGCAGUUCGUU | 6770 | AACGAACUGCCUCUUUAAA |
| siRNA 1281 | 1281 | UUAAAGAGGCAGUUCGUUA | 6771 | UAACGAACUGCCUCUUUAA |
| siRNA 1282 | 1282 | UAAAGAGGCAGUUCGUUAU | 6772 | AUAACGAACUGCCUCUUUA |
| siRNA 1283 | 1283 | AAAGAGGCAGUUCGUUAUG | 6773 | CAUAACGAACUGCCUCUUU |
| siRNA 1284 | 1284 | AAGAGGCAGUUCGUUAUGU | 6774 | ACAUAACGAACUGCCUCUU |
| siRNA 1285 | 1285 | AGAGGCAGUUCGUUAUGUC | 6775 | GACAUAACGAACUGCCUCU |
| siRNA 1286 | 1286 | GAGGCAGUUCGUUAUGUCC | 6776 | GGACAUAACGAACUGCCUC |
| siRNA 1287 | 1287 | AGGCAGUUCGUUAUGUCCU | 6777 | AGGACAUAACGAACUGCCU |
| siRNA 1288 | 1288 | GGCAGUUCGUUAUGUCCUU | 6778 | AAGGACAUAACGAACUGCC |
| siRNA 1289 | 1289 | GCAGUUCGUUAUGUCCUUC | 6779 | GAAGGACAUAACGAACUGC |
| siRNA 1290 | 1290 | CAGUUCGUUAUGUCCUUCC | 6780 | GGAAGGACAUAACGAACUG |
| siRNA 1291 | 1291 | AGUUCGUUAUGUCCUUCCA | 6781 | UGGAAGGACAUAACGAACU |
| siRNA 1292 | 1292 | GUUCGUUAUGUCCUUCCAC | 6782 | GUGGAAGGACAUAACGAAC |
| siRNA 1293 | 1293 | UUCGUUAUGUCCUUCCACG | 6783 | CGUGGAAGGACAUAACGAA |
| siRNA 1294 | 1294 | UCGUUAUGUCCUUCCACGU | 6784 | ACGUGGAAGGACAUAACGA |
| siRNA 1295 | 1295 | CGUUAUGUCCUUCCACGUC | 6785 | GACGUGGAAGGACAUAACG |
| siRNA 1296 | 1296 | GUUAUGUCCUUCCACGUCU | 6786 | AGACGUGGAAGGACAUAAC |
| siRNA 1297 | 1297 | UUAUGUCCUUCCACGUCUU | 6787 | AAGACGUGGAAGGACAUAA |
| siRNA 1298 | 1298 | UAUGUCCUUCCACGUCUUA | 6788 | UAAGACGUGGAAGGACAUA |
| siRNA 1299 | 1299 | AUGUCCUUCCACGUCUUAU | 6789 | AUAAGACGUGGAAGGACAU |
| siRNA 1300 | 1300 | UGUCCUUCCACGUCUUAUG | 6790 | CAUAAGACGUGGAAGGACA |
| siRNA 1301 | 1301 | GUCCUUCCACGUCUUAUGC | 6791 | GCAUAAGACGUGGAAGGAC |
| siRNA 1302 | 1302 | UCCUUCCACGUCUUAUGCU | 6792 | AGCAUAAGACGUGGAAGGA |
| siRNA 1303 | 1303 | CCUUCCACGUCUUAUGCUG | 6793 | CAGCAUAAGACGUGGAAGG |
| siRNA 1304 | 1304 | CUUCCACGUCUUAUGCUGG | 6794 | CCAGCAUAAGACGUGGAAG |
| siRNA 1305 | 1305 | UUCCACGUCUUAUGCUGGU | 6795 | ACCAGCAUAAGACGUGGAA |
| siRNA 1306 | 1306 | UCCACGUCUUAUGCUGGUG | 6796 | CACCAGCAUAAGACGUGGA |
| siRNA 1307 | 1307 | CCACGUCUUAUGCUGGUGC | 6797 | GCACCAGCAUAAGACGUGG |
| siRNA 1308 | 1308 | CACGUCUUAUGCUGGUGCC | 6798 | GGCACCAGCAUAAGACGUG |
| siRNA 1309 | 1309 | ACGUCUUAUGCUGGUGCCA | 6799 | UGGCACCAGCAUAAGACGU |
| siRNA 1310 | 1310 | CGUCUUAUGCUGGUGCCAG | 6800 | CUGGCACCAGCAUAAGACG |
| siRNA 1311 | 1311 | GUCUUAUGCUGGUGCCAGU | 6801 | ACUGGCACCAGCAUAAGAC |
| siRNA 1312 | 1312 | UCUUAUGCUGGUGCCAGUG | 6802 | CACUGGCACCAGCAUAAGA |
| siRNA 1313 | 1313 | CUUAUGCUGGUGCCAGUGU | 6803 | ACACUGGCACCAGCAUAAG |
| siRNA 1314 | 1314 | UUAUGCUGGUGCCAGUGUA | 6804 | UACACUGGCACCAGCAUAA |
| siRNA 1315 | 1315 | UAUGCUGGUGCCAGUGUAU | 6805 | AUACACUGGCACCAGCAUA |
| siRNA 1316 | 1316 | AUGCUGGUGCCAGUGUAUC | 6806 | GAUACACUGGCACCAGCAU |
| siRNA 1317 | 1317 | UGCUGGUGCCAGUGUAUCA | 6807 | UGAUACACUGGCACCAGCA |
| siRNA 1318 | 1318 | GCUGGUGCCAGUGUAUCAC | 6808 | GUGAUACACUGGCACCAGC |
| siRNA 1319 | 1319 | CUGGUGCCAGUGUAUCACU | 6809 | AGUGAUACACUGGCACCAG |
| siRNA 1320 | 1320 | UGGUGCCAGUGUAUCACUG | 6810 | CAGUGAUACACUGGCACCA |
| siRNA 1321 | 1321 | GGUGCCAGUGUAUCACUGU | 6811 | ACAGUGAUACACUGGCACC |
| siRNA 1322 | 1322 | GUGCCAGUGUAUCACUGUU | 6812 | AACAGUGAUACACUGGCAC |
| siRNA 1323 | 1323 | UGCCAGUGUAUCACUGUUG | 6813 | CAACAGUGAUACACUGGCA |
| siRNA 1324 | 1324 | GCCAGUGUAUCACUGUUGG | 6814 | CCAACAGUGAUACACUGGC |
| siRNA 1325 | 1325 | CCAGUGUAUCACUGUUGGC | 6815 | GCCAACAGUGAUACACUGG |
| siRNA 1326 | 1326 | CAGUGUAUCACUGUUGGCA | 6816 | UGCCAACAGUGAUACACUG |
| siRNA 1327 | 1327 | AGUGUAUCACUGUUGGCAC | 6817 | GUGCCAACAGUGAUACACU |
| siRNA 1328 | 1328 | GUGUAUCACUGUUGGCACU | 6818 | AGUGCCAACAGUGAUACAC |
| siRNA 1329 | 1329 | UGUAUCACUGUUGGCACUA | 6819 | UAGUGCCAACAGUGAUACA |
| siRNA 1330 | 1330 | GUAUCACUGUUGGCACUAC | 6820 | GUAGUGCCAACAGUGAUAC |
| siRNA 1331 | 1331 | UAUCACUGUUGGCACUACU | 6821 | AGUAGUGCCAACAGUGAUA |
| siRNA 1332 | 1332 | AUCACUGUUGGCACUACUU | 6822 | AAGUAGUGCCAACAGUGAU |
| siRNA 1333 | 1333 | UCACUGUUGGCACUACUUU | 6823 | AAAGUAGUGCCAACAGUGA |
| siRNA 1334 | 1334 | CACUGUUGGCACUACUUUG | 6824 | CAAAGUAGUGCCAACAGUG |
| siRNA 1335 | 1335 | ACUGUUGGCACUACUUUGA | 6825 | UCAAAGUAGUGCCAACAGU |
| siRNA 1336 | 1336 | CUGUUGGCACUACUUUGAG | 6826 | CUCAAAGUAGUGCCAACAG |
| siRNA 1337 | 1337 | UGUUGGCACUACUUUGAGU | 6827 | ACUCAAAGUAGUGCCAACA |
| siRNA 1338 | 1338 | GUUGGCACUACUUUGAGUU | 6828 | AACUCAAAGUAGUGCCAAC |
| siRNA 1339 | 1339 | UUGGCACUACUUUGAGUUA | 6829 | UAACUCAAAGUAGUGCCAA |
| siRNA 1340 | 1340 | UGGCACUACUUUGAGUUAC | 6830 | GUAACUCAAAGUAGUGCCA |
| siRNA 1341 | 1341 | GGCACUACUUUGAGUUACU | 6831 | AGUAACUCAAAGUAGUGCC |
| siRNA 1342 | 1342 | GCACUACUUUGAGUUACUA | 6832 | UAGUAACUCAAAGUAGUGC |
| siRNA 1343 | 1343 | CACUACUUUGAGUUACUAA | 6833 | UUAGUAACUCAAAGUAGUG |
| siRNA 1344 | 1344 | ACUACUUUGAGUUACUAAA | 6834 | UUUAGUAACUCAAAGUAGU |
| siRNA 1345 | 1345 | CUACUUUGAGUUACUAAAG | 6835 | CUUUAGUAACUCAAAGUAG |
| siRNA 1346 | 1346 | UACUUUGAGUUACUAAAGC | 6836 | GCUUUAGUAACUCAAAGUA |
| siRNA 1347 | 1347 | ACUUUGAGUUACUAAAGCA | 6837 | UGCUUUAGUAACUCAAAGU |
| siRNA 1348 | 1348 | CUUUGAGUUACUAAAGCAA | 6838 | UUGCUUUAGUAACUCAAAG |
| siRNA 1349 | 1349 | UUUGAGUUACUAAAGCAAU | 6839 | AUUGCUUUAGUAACUCAAA |
| siRNA 1350 | 1350 | UUGAGUUACUAAAGCAAUU | 6840 | AAUUGCUUUAGUAACUCAA |
| siRNA 1351 | 1351 | UGAGUUACUAAAGCAAUUG | 6841 | CAAUUGCUUUAGUAACUCA |
| siRNA 1352 | 1352 | GAGUUACUAAAGCAAUUGA | 6842 | UCAAUUGCUUUAGUAACUC |
| siRNA 1353 | 1353 | AGUUACUAAAGCAAUUGAA | 6843 | UUCAAUUGCUUUAGUAACU |
| siRNA 1354 | 1354 | GUUACUAAAGCAAUUGAAA | 6844 | UUUCAAUUGCUUUAGUAAC |
| siRNA 1355 | 1355 | UUACUAAAGCAAUUGAAAG | 6845 | CUUUCAAUUGCUUUAGUAA |
| siRNA 1356 | 1356 | UACUAAAGCAAUUGAAAGC | 6846 | GCUUUCAAUUGCUUUAGUA |
| siRNA 1357 | 1357 | ACUAAAGCAAUUGAAAGCA | 6847 | UGCUUUCAAUUGCUUUAGU |
| siRNA 1358 | 1358 | CUAAAGCAAUUGAAAGCAU | 6848 | AUGCUUUCAAUUGCUUUAG |
| siRNA 1359 | 1359 | UAAAGCAAUUGAAAGCAUG | 6849 | CAUGCUUUCAAUUGCUUUA |
| siRNA 1360 | 1360 | AAAGCAAUUGAAAGCAUGU | 6850 | ACAUGCUUUCAAUUGCUUU |
| siRNA 1361 | 1361 | AAGCAAUUGAAAGCAUGUA | 6851 | UACAUGCUUUCAAUUGCUU |
| siRNA 1362 | 1362 | AGCAAUUGAAAGCAUGUAG | 6852 | CUACAUGCUUUCAAUUGCU |
| siRNA 1363 | 1363 | GCAAUUGAAAGCAUGUAGU | 6853 | ACUACAUGCUUUCAAUUGC |
| siRNA 1364 | 1364 | CAAUUGAAAGCAUGUAGUG | 6854 | CACUACAUGCUUUCAAUUG |
| siRNA 1365 | 1365 | AAUUGAAAGCAUGUAGUGA | 6855 | UCACUACAUGCUUUCAAUU |
| siRNA 1366 | 1366 | AUUGAAAGCAUGUAGUGAA | 6856 | UUCACUACAUGCUUUCAAU |
| siRNA 1367 | 1367 | UUGAAAGCAUGUAGUGAAG | 6857 | CUUCACUACAUGCUUUCAA |
| siRNA 1368 | 1368 | UGAAAGCAUGUAGUGAAGA | 6858 | UCUUCACUACAUGCUUUCA |
| siRNA 1369 | 1369 | GAAAGCAUGUAGUGAAGAA | 6859 | UUCUUCACUACAUGCUUUC |
| siRNA 1370 | 1370 | AAAGCAUGUAGUGAAGAAC | 6860 | GUUCUUCACUACAUGCUUU |
| siRNA 1371 | 1371 | AAGCAUGUAGUGAAGAACA | 6861 | UGUUCUUCACUACAUGCUU |
| siRNA 1372 | 1372 | AGCAUGUAGUGAAGAACAA | 6862 | UUGUUCUUCACUACAUGCU |
| siRNA 1373 | 1373 | GCAUGUAGUGAAGAACAAG | 6863 | CUUGUUCUUCACUACAUGC |
| siRNA 1374 | 1374 | CAUGUAGUGAAGAACAAGA | 6864 | UCUUGUUCUUCACUACAUG |
| siRNA 1375 | 1375 | AUGUAGUGAAGAACAAGAA | 6865 | UUCUUGUUCUUCACUACAU |
| siRNA 1376 | 1376 | UGUAGUGAAGAACAAGAAG | 6866 | CUUCUUGUUCUUCACUACA |
| siRNA 1377 | 1377 | GUAGUGAAGAACAAGAAGA | 6867 | UCUUCUUGUUCUUCACUAC |
| siRNA 1378 | 1378 | UAGUGAAGAACAAGAAGAC | 6868 | GUCUUCUUGUUCUUCACUA |
| siRNA 1379 | 1379 | AGUGAAGAACAAGAAGACA | 6869 | UGUCUUCUUGUUCUUCACU |
| siRNA 1380 | 1380 | GUGAAGAACAAGAAGACAG | 6870 | CUGUCUUCUUGUUCUUCAC |
| siRNA 1381 | 1381 | UGAAGAACAAGAAGACAGA | 6871 | UCUGUCUUCUUGUUCUUCA |
| siRNA 1382 | 1382 | GAAGAACAAGAAGACAGAG | 6872 | CUCUGUCUUCUUGUUCUUC |
| siRNA 1383 | 1383 | AAGAACAAGAAGACAGAGA | 6873 | UCUCUGUCUUCUUGUUCUU |
| siRNA 1384 | 1384 | AGAACAAGAAGACAGAGAA | 6874 | UUCUCUGUCUUCUUGUUCU |
| siRNA 1385 | 1385 | GAACAAGAAGACAGAGAAU | 6875 | AUUCUCUGUCUUCUUGUUC |
| siRNA 1386 | 1386 | AACAAGAAGACAGAGAAUG | 6876 | CAUUCUCUGUCUUCUUGUU |
| siRNA 1387 | 1387 | ACAAGAAGACAGAGAAUGU | 6877 | ACAUUCUCUGUCUUCUUGU |
| siRNA 1388 | 1388 | CAAGAAGACAGAGAAUGUU | 6878 | AACAUUCUCUGUCUUCUUG |
| siRNA 1389 | 1389 | AAGAAGACAGAGAAUGUUU | 6879 | AAACAUUCUCUGUCUUCUU |
| siRNA 1390 | 1390 | AGAAGACAGAGAAUGUUUG | 6880 | CAAACAUUCUCUGUCUUCU |
| siRNA 1391 | 1391 | GAAGACAGAGAAUGUUUGA | 6881 | UCAAACAUUCUCUGUCUUC |
| siRNA 1392 | 1392 | AAGACAGAGAAUGUUUGAA | 6882 | UUCAAACAUUCUCUGUCUU |
| siRNA 1393 | 1393 | AGACAGAGAAUGUUUGAAC | 6883 | GUUCAAACAUUCUCUGUCU |
| siRNA 1394 | 1394 | GACAGAGAAUGUUUGAACC | 6884 | GGUUCAAACAUUCUCUGUC |
| siRNA 1395 | 1395 | ACAGAGAAUGUUUGAACCA | 6885 | UGGUUCAAACAUUCUCUGU |
| siRNA 1396 | 1396 | CAGAGAAUGUUUGAACCAA | 6886 | UUGGUUCAAACAUUCUCUG |
| siRNA 1397 | 1397 | AGAGAAUGUUUGAACCAAG | 6887 | CUUGGUUCAAACAUUCUCU |
| siRNA 1398 | 1398 | GAGAAUGUUUGAACCAAGC | 6888 | GCUUGGUUCAAACAUUCUC |
| siRNA 1399 | 1399 | AGAAUGUUUGAACCAAGCU | 6889 | AGCUUGGUUCAAACAUUCU |
| siRNA 1400 | 1400 | GAAUGUUUGAACCAAGCUA | 6890 | UAGCUUGGUUCAAACAUUC |
| siRNA 1401 | 1401 | AAUGUUUGAACCAAGCUAU | 6891 | AUAGCUUGGUUCAAACAUU |
| siRNA 1402 | 1402 | AUGUUUGAACCAAGCUAUU | 6892 | AAUAGCUUGGUUCAAACAU |
| siRNA 1403 | 1403 | UGUUUGAACCAAGCUAUUA | 6893 | UAAUAGCUUGGUUCAAACA |
| siRNA 1404 | 1404 | GUUUGAACCAAGCUAUUAC | 6894 | GUAAUAGCUUGGUUCAAAC |
| siRNA 1405 | 1405 | UUUGAACCAAGCUAUUACU | 6895 | AGUAAUAGCUUGGUUCAAA |
| siRNA 1406 | 1406 | UUGAACCAAGCUAUUACUG | 6896 | CAGUAAUAGCUUGGUUCAA |
| siRNA 1407 | 1407 | UGAACCAAGCUAUUACUGC | 6897 | GCAGUAAUAGCUUGGUUCA |
| siRNA 1408 | 1408 | GAACCAAGCUAUUACUGCU | 6898 | AGCAGUAAUAGCUUGGUUC |
| siRNA 1409 | 1409 | AACCAAGCUAUUACUGCUC | 6899 | GAGCAGUAAUAGCUUGGUU |
| siRNA 1410 | 1410 | ACCAAGCUAUUACUGCUCU | 6900 | AGAGCAGUAAUAGCUUGGU |
| siRNA 1411 | 1411 | CCAAGCUAUUACUGCUCUC | 6901 | GAGAGCAGUAAUAGCUUGG |
| siRNA 1412 | 1412 | CAAGCUAUUACUGCUCUCA | 6902 | UGAGAGCAGUAAUAGCUUG |
| siRNA 1413 | 1413 | AAGCUAUUACUGCUCUCAU | 6903 | AUGAGAGCAGUAAUAGCUU |
| siRNA 1414 | 1414 | AGCUAUUACUGCUCUCAUG | 6904 | CAUGAGAGCAGUAAUAGCU |
| siRNA 1415 | 1415 | GCUAUUACUGCUCUCAUGA | 6905 | UCAUGAGAGCAGUAAUAGC |
| siRNA 1416 | 1416 | CUAUUACUGCUCUCAUGAA | 6906 | UUCAUGAGAGCAGUAAUAG |
| siRNA 1417 | 1417 | UAUUACUGCUCUCAUGAAU | 6907 | AUUCAUGAGAGCAGUAAUA |
| siRNA 1418 | 1418 | AUUACUGCUCUCAUGAAUC | 6908 | GAUUCAUGAGAGCAGUAAU |
| siRNA 1419 | 1419 | UUACUGCUCUCAUGAAUCU | 6909 | AGAUUCAUGAGAGCAGUAA |
| siRNA 1420 | 1420 | UACUGCUCUCAUGAAUCUC | 6910 | GAGAUUCAUGAGAGCAGUA |
| siRNA 1421 | 1421 | ACUGCUCUCAUGAAUCUCC | 6911 | GGAGAUUCAUGAGAGCAGU |
| siRNA 1422 | 1422 | CUGCUCUCAUGAAUCUCCA | 6912 | UGGAGAUUCAUGAGAGCAG |
| siRNA 1423 | 1423 | UGCUCUCAUGAAUCUCCAA | 6913 | UUGGAGAUUCAUGAGAGCA |
| siRNA 1424 | 1424 | GCUCUCAUGAAUCUCCAAG | 6914 | CUUGGAGAUUCAUGAGAGC |
| siRNA 1425 | 1425 | CUCUCAUGAAUCUCCAAGG | 6915 | CCUUGGAGAUUCAUGAGAG |
| siRNA 1426 | 1426 | UCUCAUGAAUCUCCAAGGU | 6916 | ACCUUGGAGAUUCAUGAGA |
| siRNA 1427 | 1427 | CUCAUGAAUCUCCAAGGUA | 6917 | UACCUUGGAGAUUCAUGAG |
| siRNA 1428 | 1428 | UCAUGAAUCUCCAAGGUAG | 6918 | CUACCUUGGAGAUUCAUGA |
| siRNA 1429 | 1429 | CAUGAAUCUCCAAGGUAGC | 6919 | GCUACCUUGGAGAUUCAUG |
| siRNA 1430 | 1430 | AUGAAUCUCCAAGGUAGCA | 6920 | UGCUACCUUGGAGAUUCAU |
| siRNA 1431 | 1431 | UGAAUCUCCAAGGUAGCAU | 6921 | AUGCUACCUUGGAGAUUCA |
| siRNA 1432 | 1432 | GAAUCUCCAAGGUAGCAUG | 6922 | CAUGCUACCUUGGAGAUUC |
| siRNA 1433 | 1433 | AAUCUCCAAGGUAGCAUGG | 6923 | CCAUGCUACCUUGGAGAUU |
| siRNA 1434 | 1434 | AUCUCCAAGGUAGCAUGGA | 6924 | UCCAUGCUACCUUGGAGAU |
| siRNA 1435 | 1435 | UCUCCAAGGUAGCAUGGAC | 6925 | GUCCAUGCUACCUUGGAGA |
| siRNA 1436 | 1436 | CUCCAAGGUAGCAUGGACC | 6926 | GGUCCAUGCUACCUUGGAG |
| siRNA 1437 | 1437 | UCCAAGGUAGCAUGGACCG | 6927 | CGGUCCAUGCUACCUUGGA |
| siRNA 1438 | 1438 | CCAAGGUAGCAUGGACCGA | 6928 | UCGGUCCAUGCUACCUUGG |
| siRNA 1439 | 1439 | CAAGGUAGCAUGGACCGAA | 6929 | UUCGGUCCAUGCUACCUUG |
| siRNA 1440 | 1440 | AAGGUAGCAUGGACCGAAU | 6930 | AUUCGGUCCAUGCUACCUU |
| siRNA 1441 | 1441 | AGGUAGCAUGGACCGAAUU | 6931 | AAUUCGGUCCAUGCUACCU |
| siRNA 1442 | 1442 | GGUAGCAUGGACCGAAUUU | 6932 | AAAUUCGGUCCAUGCUACC |
| siRNA 1443 | 1443 | GUAGCAUGGACCGAAUUUA | 6933 | UAAAUUCGGUCCAUGCUAC |
| siRNA 1444 | 1444 | UAGCAUGGACCGAAUUUAC | 6934 | GUAAAUUCGGUCCAUGCUA |
| siRNA 1445 | 1445 | AGCAUGGACCGAAUUUACA | 6935 | UGUAAAUUCGGUCCAUGCU |
| siRNA 1446 | 1446 | GCAUGGACCGAAUUUACAA | 6936 | UUGUAAAUUCGGUCCAUGC |
| siRNA 1447 | 1447 | CAUGGACCGAAUUUACAAG | 6937 | CUUGUAAAUUCGGUCCAUG |
| siRNA 1448 | 1448 | AUGGACCGAAUUUACAAGC | 6938 | GCUUGUAAAUUCGGUCCAU |
| siRNA 1449 | 1449 | UGGACCGAAUUUACAAGCA | 6939 | UGCUUGUAAAUUCGGUCCA |
| siRNA 1450 | 1450 | GGACCGAAUUUACAAGCAG | 6940 | CUGCUUGUAAAUUCGGUCC |
| siRNA 1451 | 1451 | GACCGAAUUUACAAGCAGU | 6941 | ACUGCUUGUAAAUUCGGUC |
| siRNA 1452 | 1452 | ACCGAAUUUACAAGCAGUA | 6942 | UACUGCUUGUAAAUUCGGU |
| siRNA 1453 | 1453 | CCGAAUUUACAAGCAGUAU | 6943 | AUACUGCUUGUAAAUUCGG |
| siRNA 1454 | 1454 | CGAAUUUACAAGCAGUAUU | 6944 | AAUACUGCUUGUAAAUUCG |
| siRNA 1455 | 1455 | GAAUUUACAAGCAGUAUUC | 6945 | GAAUACUGCUUGUAAAUUC |
| siRNA 1456 | 1456 | AAUUUACAAGCAGUAUUCA | 6946 | UGAAUACUGCUUGUAAAUU |
| siRNA 1457 | 1457 | AUUUACAAGCAGUAUUCAC | 6947 | GUGAAUACUGCUUGUAAAU |
| siRNA 1458 | 1458 | UUUACAAGCAGUAUUCACC | 6948 | GGUGAAUACUGCUUGUAAA |
| siRNA 1459 | 1459 | UUACAAGCAGUAUUCACCU | 6949 | AGGUGAAUACUGCUUGUAA |
| siRNA 1460 | 1460 | UACAAGCAGUAUUCACCUA | 6950 | UAGGUGAAUACUGCUUGUA |
| siRNA 1461 | 1461 | ACAAGCAGUAUUCACCUAG | 6951 | CUAGGUGAAUACUGCUUGU |
| siRNA 1462 | 1462 | CAAGCAGUAUUCACCUAGA | 6952 | UCUAGGUGAAUACUGCUUG |
| siRNA 1463 | 1463 | AAGCAGUAUUCACCUAGAC | 6953 | GUCUAGGUGAAUACUGCUU |
| siRNA 1464 | 1464 | AGCAGUAUUCACCUAGACG | 6954 | CGUCUAGGUGAAUACUGCU |
| siRNA 1465 | 1465 | GCAGUAUUCACCUAGACGU | 6955 | ACGUCUAGGUGAAUACUGC |
| siRNA 1466 | 1466 | CAGUAUUCACCUAGACGUC | 6956 | GACGUCUAGGUGAAUACUG |
| siRNA 1467 | 1467 | AGUAUUCACCUAGACGUCG | 6957 | CGACGUCUAGGUGAAUACU |
| siRNA 1468 | 1468 | GUAUUCACCUAGACGUCGA | 6958 | UCGACGUCUAGGUGAAUAC |
| siRNA 1469 | 1469 | UAUUCACCUAGACGUCGAC | 6959 | GUCGACGUCUAGGUGAAUA |
| siRNA 1470 | 1470 | AUUCACCUAGACGUCGACC | 6960 | GGUCGACGUCUAGGUGAAU |
| siRNA 1471 | 1471 | UUCACCUAGACGUCGACCU | 6961 | AGGUCGACGUCUAGGUGAA |
| siRNA 1472 | 1472 | UCACCUAGACGUCGACCUG | 6962 | CAGGUCGACGUCUAGGUGA |
| siRNA 1473 | 1473 | CACCUAGACGUCGACCUGG | 6963 | CCAGGUCGACGUCUAGGUG |
| siRNA 1474 | 1474 | ACCUAGACGUCGACCUGGA | 6964 | UCCAGGUCGACGUCUAGGU |
| siRNA 1475 | 1475 | CCUAGACGUCGACCUGGAG | 6965 | CUCCAGGUCGACGUCUAGG |
| siRNA 1476 | 1476 | CUAGACGUCGACCUGGAGA | 6966 | UCUCCAGGUCGACGUCUAG |
| siRNA 1477 | 1477 | UAGACGUCGACCUGGAGAU | 6967 | AUCUCCAGGUCGACGUCUA |
| siRNA 1478 | 1478 | AGACGUCGACCUGGAGAUC | 6968 | GAUCUCCAGGUCGACGUCU |
| siRNA 1479 | 1479 | GACGUCGACCUGGAGAUCC | 6969 | GGAUCUCCAGGUCGACGUC |
| siRNA 1480 | 1480 | ACGUCGACCUGGAGAUCCU | 6970 | AGGAUCUCCAGGUCGACGU |
| siRNA 1481 | 1481 | CGUCGACCUGGAGAUCCUG | 6971 | CAGGAUCUCCAGGUCGACG |
| siRNA 1482 | 1482 | GUCGACCUGGAGAUCCUGU | 6972 | ACAGGAUCUCCAGGUCGAC |
| siRNA 1483 | 1483 | UCGACCUGGAGAUCCUGUU | 6973 | AACAGGAUCUCCAGGUCGA |
| siRNA 1484 | 1484 | CGACCUGGAGAUCCUGUUU | 6974 | AAACAGGAUCUCCAGGUCG |
| siRNA 1485 | 1485 | GACCUGGAGAUCCUGUUUG | 6975 | CAAACAGGAUCUCCAGGUC |
| siRNA 1486 | 1486 | ACCUGGAGAUCCUGUUUGC | 6976 | GCAAACAGGAUCUCCAGGU |
| siRNA 1487 | 1487 | CCUGGAGAUCCUGUUUGCC | 6977 | GGCAAACAGGAUCUCCAGG |
| siRNA 1488 | 1488 | CUGGAGAUCCUGUUUGCCC | 6978 | GGGCAAACAGGAUCUCCAG |
| siRNA 1489 | 1489 | UGGAGAUCCUGUUUGCCCU | 6979 | AGGGCAAACAGGAUCUCCA |
| siRNA 1490 | 1490 | GGAGAUCCUGUUUGCCCUU | 6980 | AAGGGCAAACAGGAUCUCC |
| siRNA 1491 | 1491 | GAGAUCCUGUUUGCCCUUU | 6981 | AAAGGGCAAACAGGAUCUC |
| siRNA 1492 | 1492 | AGAUCCUGUUUGCCCUUUU | 6982 | AAAAGGGCAAACAGGAUCU |
| siRNA 1493 | 1493 | GAUCCUGUUUGCCCUUUUU | 6983 | AAAAAGGGCAAACAGGAUC |
| siRNA 1494 | 1494 | AUCCUGUUUGCCCUUUUUA | 6984 | UAAAAAGGGCAAACAGGAU |
| siRNA 1495 | 1495 | UCCUGUUUGCCCUUUUUAU | 6985 | AUAAAAAGGGCAAACAGGA |
| siRNA 1496 | 1496 | CCUGUUUGCCCUUUUUAUA | 6986 | UAUAAAAAGGGCAAACAGG |
| siRNA 1497 | 1497 | CUGUUUGCCCUUUUUAUAG | 6987 | CUAUAAAAAGGGCAAACAG |
| siRNA 1498 | 1498 | UGUUUGCCCUUUUUAUAGU | 6988 | ACUAUAAAAAGGGCAAACA |
| siRNA 1499 | 1499 | GUUUGCCCUUUUUAUAGUC | 6989 | GACUAUAAAAAGGGCAAAC |
| siRNA 1500 | 1500 | UUUGCCCUUUUUAUAGUCA | 6990 | UGACUAUAAAAAGGGCAAA |
| siRNA 1501 | 1501 | UUGCCCUUUUUAUAGUCAC | 6991 | GUGACUAUAAAAAGGGCAA |
| siRNA 1502 | 1502 | UGCCCUUUUUAUAGUCACC | 6992 | GGUGACUAUAAAAAGGGCA |
| siRNA 1503 | 1503 | GCCCUUUUUAUAGUCACCA | 6993 | UGGUGACUAUAAAAAGGGC |
| siRNA 1504 | 1504 | CCCUUUUUAUAGUCACCAA | 6994 | UUGGUGACUAUAAAAAGGG |
| siRNA 1505 | 1505 | CCUUUUUAUAGUCACCAAU | 6995 | AUUGGUGACUAUAAAAAGG |
| siRNA 1506 | 1506 | CUUUUUAUAGUCACCAAUU | 6996 | AAUUGGUGACUAUAAAAAG |
| siRNA 1507 | 1507 | UUUUUAUAGUCACCAAUUA | 6997 | UAAUUGGUGACUAUAAAAA |
| siRNA 1508 | 1508 | UUUUAUAGUCACCAAUUAA | 6998 | UUAAUUGGUGACUAUAAAA |
| siRNA 1509 | 1509 | UUUAUAGUCACCAAUUAAG | 6999 | CUUAAUUGGUGACUAUAAA |
| siRNA 1510 | 1510 | UUAUAGUCACCAAUUAAGA | 7000 | UCUUAAUUGGUGACUAUAA |
| siRNA 1511 | 1511 | UAUAGUCACCAAUUAAGAA | 7001 | UUCUUAAUUGGUGACUAUA |
| siRNA 1512 | 1512 | AUAGUCACCAAUUAAGAAG | 7002 | CUUCUUAAUUGGUGACUAU |
| siRNA 1513 | 1513 | UAGUCACCAAUUAAGAAGC | 7003 | GCUUCUUAAUUGGUGACUA |
| siRNA 1514 | 1514 | AGUCACCAAUUAAGAAGCA | 7004 | UGCUUCUUAAUUGGUGACU |
| siRNA 1515 | 1515 | GUCACCAAUUAAGAAGCAA | 7005 | UUGCUUCUUAAUUGGUGAC |
| siRNA 1516 | 1516 | UCACCAAUUAAGAAGCAAA | 7006 | UUUGCUUCUUAAUUGGUGA |
| siRNA 1517 | 1517 | CACCAAUUAAGAAGCAAAC | 7007 | GUUUGCUUCUUAAUUGGUG |
| siRNA 1518 | 1518 | ACCAAUUAAGAAGCAAACA | 7008 | UGUUUGCUUCUUAAUUGGU |
| siRNA 1519 | 1519 | CCAAUUAAGAAGCAAACAC | 7009 | GUGUUUGCUUCUUAAUUGG |
| siRNA 1520 | 1520 | CAAUUAAGAAGCAAACACC | 7010 | GGUGUUUGCUUCUUAAUUG |
| siRNA 1521 | 1521 | AAUUAAGAAGCAAACACCU | 7011 | AGGUGUUUGCUUCUUAAUU |
| siRNA 1522 | 1522 | AUUAAGAAGCAAACACCUG | 7012 | CAGGUGUUUGCUUCUUAAU |
| siRNA 1523 | 1523 | UUAAGAAGCAAACACCUGG | 7013 | CCAGGUGUUUGCUUCUUAA |
| siRNA 1524 | 1524 | UAAGAAGCAAACACCUGGC | 7014 | GCCAGGUGUUUGCUUCUUA |
| siRNA 1525 | 1525 | AAGAAGCAAACACCUGGCU | 7015 | AGCCAGGUGUUUGCUUCUU |
| siRNA 1526 | 1526 | AGAAGCAAACACCUGGCUA | 7016 | UAGCCAGGUGUUUGCUUCU |
| siRNA 1527 | 1527 | GAAGCAAACACCUGGCUAU | 7017 | AUAGCCAGGUGUUUGCUUC |
| siRNA 1528 | 1528 | AAGCAAACACCUGGCUAUC | 7018 | GAUAGCCAGGUGUUUGCUU |
| siRNA 1529 | 1529 | AGCAAACACCUGGCUAUCA | 7019 | UGAUAGCCAGGUGUUUGCU |
| siRNA 1530 | 1530 | GCAAACACCUGGCUAUCAA | 7020 | UUGAUAGCCAGGUGUUUGC |
| siRNA 1531 | 1531 | CAAACACCUGGCUAUCAAA | 7021 | UUUGAUAGCCAGGUGUUUG |
| siRNA 1532 | 1532 | AAACACCUGGCUAUCAAAA | 7022 | UUUUGAUAGCCAGGUGUUU |
| siRNA 1533 | 1533 | AACACCUGGCUAUCAAAAA | 7023 | UUUUUGAUAGCCAGGUGUU |
| siRNA 1534 | 1534 | ACACCUGGCUAUCAAAAAA | 7024 | UUUUUUGAUAGCCAGGUGU |
| siRNA 1535 | 1535 | CACCUGGCUAUCAAAAAAA | 7025 | UUUUUUUGAUAGCCAGGUG |
| siRNA 1536 | 1536 | ACCUGGCUAUCAAAAAAAU | 7026 | AUUUUUUUGAUAGCCAGGU |
| siRNA 1537 | 1537 | CCUGGCUAUCAAAAAAAUG | 7027 | CAUUUUUUUGAUAGCCAGG |
| siRNA 1538 | 1538 | CUGGCUAUCAAAAAAAUGA | 7028 | UCAUUUUUUUGAUAGCCAG |
| siRNA 1539 | 1539 | UGGCUAUCAAAAAAAUGAA | 7029 | UUCAUUUUUUUGAUAGCCA |
| siRNA 1540 | 1540 | GGCUAUCAAAAAAAUGAAU | 7030 | AUUCAUUUUUUUGAUAGCC |
| siRNA 1541 | 1541 | GCUAUCAAAAAAAUGAAUG | 7031 | CAUUCAUUUUUUUGAUAGC |
| siRNA 1542 | 1542 | CUAUCAAAAAAAUGAAUGA | 7032 | UCAUUCAUUUUUUUGAUAG |
| siRNA 1543 | 1543 | UAUCAAAAAAAUGAAUGAA | 7033 | UUCAUUCAUUUUUUUGAUA |
| siRNA 1544 | 1544 | AUCAAAAAAAUGAAUGAAA | 7034 | UUUCAUUCAUUUUUUUGAU |
| siRNA 1545 | 1545 | UCAAAAAAAUGAAUGAAAU | 7035 | AUUUCAUUCAUUUUUUUGA |
| siRNA 1546 | 1546 | CAAAAAAAUGAAUGAAAUU | 7036 | AAUUUCAUUCAUUUUUUUG |
| siRNA 1547 | 1547 | AAAAAAAUGAAUGAAAUUC | 7037 | GAAUUUCAUUCAUUUUUUU |
| siRNA 1548 | 1548 | AAAAAAUGAAUGAAAUUCA | 7038 | UGAAUUUCAUUCAUUUUUU |
| siRNA 1549 | 1549 | AAAAAUGAAUGAAAUUCAG | 7039 | CUGAAUUUCAUUCAUUUUU |
| siRNA 1550 | 1550 | AAAAUGAAUGAAAUUCAGA | 7040 | UCUGAAUUUCAUUCAUUUU |
| siRNA 1551 | 1551 | AAAUGAAUGAAAUUCAGAA | 7041 | UUCUGAAUUUCAUUCAUUU |
| siRNA 1552 | 1552 | AAUGAAUGAAAUUCAGAAA | 7042 | UUUCUGAAUUUCAUUCAUU |
| siRNA 1553 | 1553 | AUGAAUGAAAUUCAGAAAA | 7043 | UUUUCUGAAUUUCAUUCAU |
| siRNA 1554 | 1554 | UGAAUGAAAUUCAGAAAAA | 7044 | UUUUUCUGAAUUUCAUUCA |
| siRNA 1555 | 1555 | GAAUGAAAUUCAGAAAAAU | 7045 | AUUUUUCUGAAUUUCAUUC |
| siRNA 1556 | 1556 | AAUGAAAUUCAGAAAAAUA | 7046 | UAUUUUUCUGAAUUUCAUU |
| siRNA 1557 | 1557 | AUGAAAUUCAGAAAAAUAU | 7047 | AUAUUUUUCUGAAUUUCAU |
| siRNA 1558 | 1558 | UGAAAUUCAGAAAAAUAUC | 7048 | GAUAUUUUUCUGAAUUUCA |
| siRNA 1559 | 1559 | GAAAUUCAGAAAAAUAUCG | 7049 | CGAUAUUUUUCUGAAUUUC |
| siRNA 1560 | 1560 | AAAUUCAGAAAAAUAUCGA | 7050 | UCGAUAUUUUUCUGAAUUU |
| siRNA 1561 | 1561 | AAUUCAGAAAAAUAUCGAU | 7051 | AUCGAUAUUUUUCUGAAUU |
| siRNA 1562 | 1562 | AUUCAGAAAAAUAUCGAUG | 7052 | CAUCGAUAUUUUUCUGAAU |
| siRNA 1563 | 1563 | UUCAGAAAAAUAUCGAUGG | 7053 | CCAUCGAUAUUUUUCUGAA |
| siRNA 1564 | 1564 | UCAGAAAAAUAUCGAUGGA | 7054 | UCCAUCGAUAUUUUUCUGA |
| siRNA 1565 | 1565 | CAGAAAAAUAUCGAUGGAU | 7055 | AUCCAUCGAUAUUUUUCUG |
| siRNA 1566 | 1566 | AGAAAAAUAUCGAUGGAUG | 7056 | CAUCCAUCGAUAUUUUUCU |
| siRNA 1567 | 1567 | GAAAAAUAUCGAUGGAUGG | 7057 | CCAUCCAUCGAUAUUUUUC |
| siRNA 1568 | 1568 | AAAAAUAUCGAUGGAUGGG | 7058 | CCCAUCCAUCGAUAUUUUU |
| siRNA 1569 | 1569 | AAAAUAUCGAUGGAUGGGA | 7059 | UCCCAUCCAUCGAUAUUUU |
| siRNA 1570 | 1570 | AAAUAUCGAUGGAUGGGAA | 7060 | UUCCCAUCCAUCGAUAUUU |
| siRNA 1571 | 1571 | AAUAUCGAUGGAUGGGAAG | 7061 | CUUCCCAUCCAUCGAUAUU |
| siRNA 1572 | 1572 | AUAUCGAUGGAUGGGAAGG | 7062 | CCUUCCCAUCCAUCGAUAU |
| siRNA 1573 | 1573 | UAUCGAUGGAUGGGAAGGC | 7063 | GCCUUCCCAUCCAUCGAUA |
| siRNA 1574 | 1574 | AUCGAUGGAUGGGAAGGCA | 7064 | UGCCUUCCCAUCCAUCGAU |
| siRNA 1575 | 1575 | UCGAUGGAUGGGAAGGCAA | 7065 | UUGCCUUCCCAUCCAUCGA |
| siRNA 1576 | 1576 | CGAUGGAUGGGAAGGCAAA | 7066 | UUUGCCUUCCCAUCCAUCG |
| siRNA 1577 | 1577 | GAUGGAUGGGAAGGCAAAG | 7067 | CUUUGCCUUCCCAUCCAUC |
| siRNA 1578 | 1578 | AUGGAUGGGAAGGCAAAGA | 7068 | UCUUUGCCUUCCCAUCCAU |
| siRNA 1579 | 1579 | UGGAUGGGAAGGCAAAGAU | 7069 | AUCUUUGCCUUCCCAUCCA |
| siRNA 1580 | 1580 | GGAUGGGAAGGCAAAGAUA | 7070 | UAUCUUUGCCUUCCCAUCC |
| siRNA 1581 | 1581 | GAUGGGAAGGCAAAGAUAU | 7071 | AUAUCUUUGCCUUCCCAUC |
| siRNA 1582 | 1582 | AUGGGAAGGCAAAGAUAUU | 7072 | AAUAUCUUUGCCUUCCCAU |
| siRNA 1583 | 1583 | UGGGAAGGCAAAGAUAUUG | 7073 | CAAUAUCUUUGCCUUCCCA |
| siRNA 1584 | 1584 | GGGAAGGCAAAGAUAUUGG | 7074 | CCAAUAUCUUUGCCUUCCC |
| siRNA 1585 | 1585 | GGAAGGCAAAGAUAUUGGA | 7075 | UCCAAUAUCUUUGCCUUCC |
| siRNA 1586 | 1586 | GAAGGCAAAGAUAUUGGAC | 7076 | GUCCAAUAUCUUUGCCUUC |
| siRNA 1587 | 1587 | AAGGCAAAGAUAUUGGACA | 7077 | UGUCCAAUAUCUUUGCCUU |
| siRNA 1588 | 1588 | AGGCAAAGAUAUUGGACAG | 7078 | CUGUCCAAUAUCUUUGCCU |
| siRNA 1589 | 1589 | GGCAAAGAUAUUGGACAGU | 7079 | ACUGUCCAAUAUCUUUGCC |
| siRNA 1590 | 1590 | GCAAAGAUAUUGGACAGUG | 7080 | CACUGUCCAAUAUCUUUGC |
| siRNA 1591 | 1591 | CAAAGAUAUUGGACAGUGU | 7081 | ACACUGUCCAAUAUCUUUG |
| siRNA 1592 | 1592 | AAAGAUAUUGGACAGUGUU | 7082 | AACACUGUCCAAUAUCUUU |
| siRNA 1593 | 1593 | AAGAUAUUGGACAGUGUUG | 7083 | CAACACUGUCCAAUAUCUU |
| siRNA 1594 | 1594 | AGAUAUUGGACAGUGUUGU | 7084 | ACAACACUGUCCAAUAUCU |
| siRNA 1595 | 1595 | GAUAUUGGACAGUGUUGUA | 7085 | UACAACACUGUCCAAUAUC |
| siRNA 1596 | 1596 | AUAUUGGACAGUGUUGUAA | 7086 | UUACAACACUGUCCAAUAU |
| siRNA 1597 | 1597 | UAUUGGACAGUGUUGUAAU | 7087 | AUUACAACACUGUCCAAUA |
| siRNA 1598 | 1598 | AUUGGACAGUGUUGUAAUG | 7088 | CAUUACAACACUGUCCAAU |
| siRNA 1599 | 1599 | UUGGACAGUGUUGUAAUGA | 7089 | UCAUUACAACACUGUCCAA |
| siRNA 1600 | 1600 | UGGACAGUGUUGUAAUGAA | 7090 | UUCAUUACAACACUGUCCA |
| siRNA 1601 | 1601 | GGACAGUGUUGUAAUGAAU | 7091 | AUUCAUUACAACACUGUCC |
| siRNA 1602 | 1602 | GACAGUGUUGUAAUGAAUU | 7092 | AAUUCAUUACAACACUGUC |
| siRNA 1603 | 1603 | ACAGUGUUGUAAUGAAUUC | 7093 | GAAUUCAUUACAACACUGU |
| siRNA 1604 | 1604 | CAGUGUUGUAAUGAAUUCA | 7094 | UGAAUUCAUUACAACACUG |
| siRNA 1605 | 1605 | AGUGUUGUAAUGAAUUCAU | 7095 | AUGAAUUCAUUACAACACU |
| siRNA 1606 | 1606 | GUGUUGUAAUGAAUUCAUU | 7096 | AAUGAAUUCAUUACAACAC |
| siRNA 1607 | 1607 | UGUUGUAAUGAAUUCAUUA | 7097 | UAAUGAAUUCAUUACAACA |
| siRNA 1608 | 1608 | GUUGUAAUGAAUUCAUUAU | 7098 | AUAAUGAAUUCAUUACAAC |
| siRNA 1609 | 1609 | UUGUAAUGAAUUCAUUAUG | 7099 | CAUAAUGAAUUCAUUACAA |
| siRNA 1610 | 1610 | UGUAAUGAAUUCAUUAUGG | 7100 | CCAUAAUGAAUUCAUUACA |
| siRNA 1611 | 1611 | GUAAUGAAUUCAUUAUGGA | 7101 | UCCAUAAUGAAUUCAUUAC |
| siRNA 1612 | 1612 | UAAUGAAUUCAUUAUGGAG | 7102 | CUCCAUAAUGAAUUCAUUA |
| siRNA 1613 | 1613 | AAUGAAUUCAUUAUGGAGG | 7103 | CCUCCAUAAUGAAUUCAUU |
| siRNA 1614 | 1614 | AUGAAUUCAUUAUGGAGGG | 7104 | CCCUCCAUAAUGAAUUCAU |
| siRNA 1615 | 1615 | UGAAUUCAUUAUGGAGGGA | 7105 | UCCCUCCAUAAUGAAUUCA |
| siRNA 1616 | 1616 | GAAUUCAUUAUGGAGGGAC | 7106 | GUCCCUCCAUAAUGAAUUC |
| siRNA 1617 | 1617 | AAUUCAUUAUGGAGGGACC | 7107 | GGUCCCUCCAUAAUGAAUU |
| siRNA 1618 | 1618 | AUUCAUUAUGGAGGGACCA | 7108 | UGGUCCCUCCAUAAUGAAU |
| siRNA 1619 | 1619 | UUCAUUAUGGAGGGACCAU | 7109 | AUGGUCCCUCCAUAAUGAA |
| siRNA 1620 | 1620 | UCAUUAUGGAGGGACCAUU | 7110 | AAUGGUCCCUCCAUAAUGA |
| siRNA 1621 | 1621 | CAUUAUGGAGGGACCAUUG | 7111 | CAAUGGUCCCUCCAUAAUG |
| siRNA 1622 | 1622 | AUUAUGGAGGGACCAUUGA | 7112 | UCAAUGGUCCCUCCAUAAU |
| siRNA 1623 | 1623 | UUAUGGAGGGACCAUUGAC | 7113 | GUCAAUGGUCCCUCCAUAA |
| siRNA 1624 | 1624 | UAUGGAGGGACCAUUGACA | 7114 | UGUCAAUGGUCCCUCCAUA |
| siRNA 1625 | 1625 | AUGGAGGGACCAUUGACAA | 7115 | UUGUCAAUGGUCCCUCCAU |
| siRNA 1626 | 1626 | UGGAGGGACCAUUGACAAG | 7116 | CUUGUCAAUGGUCCCUCCA |
| siRNA 1627 | 1627 | GGAGGGACCAUUGACAAGA | 7117 | UCUUGUCAAUGGUCCCUCC |
| siRNA 1628 | 1628 | GAGGGACCAUUGACAAGAA | 7118 | UUCUUGUCAAUGGUCCCUC |
| siRNA 1629 | 1629 | AGGGACCAUUGACAAGAAU | 7119 | AUUCUUGUCAAUGGUCCCU |
| siRNA 1630 | 1630 | GGGACCAUUGACAAGAAUC | 7120 | GAUUCUUGUCAAUGGUCCC |
| siRNA 1631 | 1631 | GGACCAUUGACAAGAAUCG | 7121 | CGAUUCUUGUCAAUGGUCC |
| siRNA 1632 | 1632 | GACCAUUGACAAGAAUCGG | 7122 | CCGAUUCUUGUCAAUGGUC |
| siRNA 1633 | 1633 | ACCAUUGACAAGAAUCGGU | 7123 | ACCGAUUCUUGUCAAUGGU |
| siRNA 1634 | 1634 | CCAUUGACAAGAAUCGGUG | 7124 | CACCGAUUCUUGUCAAUGG |
| siRNA 1635 | 1635 | CAUUGACAAGAAUCGGUGC | 7125 | GCACCGAUUCUUGUCAAUG |
| siRNA 1636 | 1636 | AUUGACAAGAAUCGGUGCC | 7126 | GGCACCGAUUCUUGUCAAU |
| siRNA 1637 | 1637 | UUGACAAGAAUCGGUGCCA | 7127 | UGGCACCGAUUCUUGUCAA |
| siRNA 1638 | 1638 | UGACAAGAAUCGGUGCCAA | 7128 | UUGGCACCGAUUCUUGUCA |
| siRNA 1639 | 1639 | GACAAGAAUCGGUGCCAAA | 7129 | UUUGGCACCGAUUCUUGUC |
| siRNA 1640 | 1640 | ACAAGAAUCGGUGCCAAAC | 7130 | GUUUGGCACCGAUUCUUGU |
| siRNA 1641 | 1641 | CAAGAAUCGGUGCCAAACA | 7131 | UGUUUGGCACCGAUUCUUG |
| siRNA 1642 | 1642 | AAGAAUCGGUGCCAAACAU | 7132 | AUGUUUGGCACCGAUUCUU |
| siRNA 1643 | 1643 | AGAAUCGGUGCCAAACAUG | 7133 | CAUGUUUGGCACCGAUUCU |
| siRNA 1644 | 1644 | GAAUCGGUGCCAAACAUGA | 7134 | UCAUGUUUGGCACCGAUUC |
| siRNA 1645 | 1645 | AAUCGGUGCCAAACAUGAA | 7135 | UUCAUGUUUGGCACCGAUU |
| siRNA 1646 | 1646 | AUCGGUGCCAAACAUGAAC | 7136 | GUUCAUGUUUGGCACCGAU |
| siRNA 1647 | 1647 | UCGGUGCCAAACAUGAACG | 7137 | CGUUCAUGUUUGGCACCGA |
| siRNA 1648 | 1648 | CGGUGCCAAACAUGAACGG | 7138 | CCGUUCAUGUUUGGCACCG |
| siRNA 1649 | 1649 | GGUGCCAAACAUGAACGGC | 7139 | GCCGUUCAUGUUUGGCACC |
| siRNA 1650 | 1650 | GUGCCAAACAUGAACGGCA | 7140 | UGCCGUUCAUGUUUGGCAC |
| siRNA 1651 | 1651 | UGCCAAACAUGAACGGCAU | 7141 | AUGCCGUUCAUGUUUGGCA |
| siRNA 1652 | 1652 | GCCAAACAUGAACGGCAUA | 7142 | UAUGCCGUUCAUGUUUGGC |
| siRNA 1653 | 1653 | CCAAACAUGAACGGCAUAU | 7143 | AUAUGCCGUUCAUGUUUGG |
| siRNA 1654 | 1654 | CAAACAUGAACGGCAUAUU | 7144 | AAUAUGCCGUUCAUGUUUG |
| siRNA 1655 | 1655 | AAACAUGAACGGCAUAUUU | 7145 | AAAUAUGCCGUUCAUGUUU |
| siRNA 1656 | 1656 | AACAUGAACGGCAUAUUUU | 7146 | AAAAUAUGCCGUUCAUGUU |
| siRNA 1657 | 1657 | ACAUGAACGGCAUAUUUUU | 7147 | AAAAAUAUGCCGUUCAUGU |
| siRNA 1658 | 1658 | CAUGAACGGCAUAUUUUUC | 7148 | GAAAAAUAUGCCGUUCAUG |
| siRNA 1659 | 1659 | AUGAACGGCAUAUUUUUCU | 7149 | AGAAAAAUAUGCCGUUCAU |
| siRNA 1660 | 1660 | UGAACGGCAUAUUUUUCUG | 7150 | CAGAAAAAUAUGCCGUUCA |
| siRNA 1661 | 1661 | GAACGGCAUAUUUUUCUGU | 7151 | ACAGAAAAAUAUGCCGUUC |
| siRNA 1662 | 1662 | AACGGCAUAUUUUUCUGUU | 7152 | AACAGAAAAAUAUGCCGUU |
| siRNA 1663 | 1663 | ACGGCAUAUUUUUCUGUUU | 7153 | AAACAGAAAAAUAUGCCGU |
| siRNA 1664 | 1664 | CGGCAUAUUUUUCUGUUUG | 7154 | CAAACAGAAAAAUAUGCCG |
| siRNA 1665 | 1665 | GGCAUAUUUUUCUGUUUGA | 7155 | UCAAACAGAAAAAUAUGCC |
| siRNA 1666 | 1666 | GCAUAUUUUUCUGUUUGAU | 7156 | AUCAAACAGAAAAAUAUGC |
| siRNA 1667 | 1667 | CAUAUUUUUCUGUUUGAUG | 7157 | CAUCAAACAGAAAAAUAUG |
| siRNA 1668 | 1668 | AUAUUUUUCUGUUUGAUGG | 7158 | CCAUCAAACAGAAAAAUAU |
| siRNA 1669 | 1669 | UAUUUUUCUGUUUGAUGGC | 7159 | GCCAUCAAACAGAAAAAUA |
| siRNA 1670 | 1670 | AUUUUUCUGUUUGAUGGCU | 7160 | AGCCAUCAAACAGAAAAAU |
| siRNA 1671 | 1671 | UUUUUCUGUUUGAUGGCUU | 7161 | AAGCCAUCAAACAGAAAAA |
| siRNA 1672 | 1672 | UUUUCUGUUUGAUGGCUUA | 7162 | UAAGCCAUCAAACAGAAAA |
| siRNA 1673 | 1673 | UUUCUGUUUGAUGGCUUAA | 7163 | UUAAGCCAUCAAACAGAAA |
| siRNA 1674 | 1674 | UUCUGUUUGAUGGCUUAAU | 7164 | AUUAAGCCAUCAAACAGAA |
| siRNA 1675 | 1675 | UCUGUUUGAUGGCUUAAUG | 7165 | CAUUAAGCCAUCAAACAGA |
| siRNA 1676 | 1676 | CUGUUUGAUGGCUUAAUGA | 7166 | UCAUUAAGCCAUCAAACAG |
| siRNA 1677 | 1677 | UGUUUGAUGGCUUAAUGAU | 7167 | AUCAUUAAGCCAUCAAACA |
| siRNA 1678 | 1678 | GUUUGAUGGCUUAAUGAUC | 7168 | GAUCAUUAAGCCAUCAAAC |
| siRNA 1679 | 1679 | UUUGAUGGCUUAAUGAUCA | 7169 | UGAUCAUUAAGCCAUCAAA |
| siRNA 1680 | 1680 | UUGAUGGCUUAAUGAUCAG | 7170 | CUGAUCAUUAAGCCAUCAA |
| siRNA 1681 | 1681 | UGAUGGCUUAAUGAUCAGU | 7171 | ACUGAUCAUUAAGCCAUCA |
| siRNA 1682 | 1682 | GAUGGCUUAAUGAUCAGUU | 7172 | AACUGAUCAUUAAGCCAUC |
| siRNA 1683 | 1683 | AUGGCUUAAUGAUCAGUUG | 7173 | CAACUGAUCAUUAAGCCAU |
| siRNA 1684 | 1684 | UGGCUUAAUGAUCAGUUGU | 7174 | ACAACUGAUCAUUAAGCCA |
| siRNA 1685 | 1685 | GGCUUAAUGAUCAGUUGUA | 7175 | UACAACUGAUCAUUAAGCC |
| siRNA 1686 | 1686 | GCUUAAUGAUCAGUUGUAA | 7176 | UUACAACUGAUCAUUAAGC |
| siRNA 1687 | 1687 | CUUAAUGAUCAGUUGUAAA | 7177 | UUUACAACUGAUCAUUAAG |
| siRNA 1688 | 1688 | UUAAUGAUCAGUUGUAAAC | 7178 | GUUUACAACUGAUCAUUAA |
| siRNA 1689 | 1689 | UAAUGAUCAGUUGUAAACC | 7179 | GGUUUACAACUGAUCAUUA |
| siRNA 1690 | 1690 | AAUGAUCAGUUGUAAACCU | 7180 | AGGUUUACAACUGAUCAUU |
| siRNA 1691 | 1691 | AUGAUCAGUUGUAAACCUA | 7181 | UAGGUUUACAACUGAUCAU |
| siRNA 1692 | 1692 | UGAUCAGUUGUAAACCUAA | 7182 | UUAGGUUUACAACUGAUCA |
| siRNA 1693 | 1693 | GAUCAGUUGUAAACCUAAU | 7183 | AUUAGGUUUACAACUGAUC |
| siRNA 1694 | 1694 | AUCAGUUGUAAACCUAAUC | 7184 | GAUUAGGUUUACAACUGAU |
| siRNA 1695 | 1695 | UCAGUUGUAAACCUAAUCA | 7185 | UGAUUAGGUUUACAACUGA |
| siRNA 1696 | 1696 | CAGUUGUAAACCUAAUCAU | 7186 | AUGAUUAGGUUUACAACUG |
| siRNA 1697 | 1697 | AGUUGUAAACCUAAUCAUG | 7187 | CAUGAUUAGGUUUACAACU |
| siRNA 1698 | 1698 | GUUGUAAACCUAAUCAUGG | 7188 | CCAUGAUUAGGUUUACAAC |
| siRNA 1699 | 1699 | UUGUAAACCUAAUCAUGGC | 7189 | GCCAUGAUUAGGUUUACAA |
| siRNA 1700 | 1700 | UGUAAACCUAAUCAUGGCC | 7190 | GGCCAUGAUUAGGUUUACA |
| siRNA 1701 | 1701 | GUAAACCUAAUCAUGGCCA | 7191 | UGGCCAUGAUUAGGUUUAC |
| siRNA 1702 | 1702 | UAAACCUAAUCAUGGCCAG | 7192 | CUGGCCAUGAUUAGGUUUA |
| siRNA 1703 | 1703 | AAACCUAAUCAUGGCCAGA | 7193 | UCUGGCCAUGAUUAGGUUU |
| siRNA 1704 | 1704 | AACCUAAUCAUGGCCAGAC | 7194 | GUCUGGCCAUGAUUAGGUU |
| siRNA 1705 | 1705 | ACCUAAUCAUGGCCAGACU | 7195 | AGUCUGGCCAUGAUUAGGU |
| siRNA 1706 | 1706 | CCUAAUCAUGGCCAGACUC | 7196 | GAGUCUGGCCAUGAUUAGG |
| siRNA 1707 | 1707 | CUAAUCAUGGCCAGACUCG | 7197 | CGAGUCUGGCCAUGAUUAG |
| siRNA 1708 | 1708 | UAAUCAUGGCCAGACUCGG | 7198 | CCGAGUCUGGCCAUGAUUA |
| siRNA 1709 | 1709 | AAUCAUGGCCAGACUCGGC | 7199 | GCCGAGUCUGGCCAUGAUU |
| siRNA 1710 | 1710 | AUCAUGGCCAGACUCGGCU | 7200 | AGCCGAGUCUGGCCAUGAU |
| siRNA 1711 | 1711 | UCAUGGCCAGACUCGGCUU | 7201 | AAGCCGAGUCUGGCCAUGA |
| siRNA 1712 | 1712 | CAUGGCCAGACUCGGCUUC | 7202 | GAAGCCGAGUCUGGCCAUG |
| siRNA 1713 | 1713 | AUGGCCAGACUCGGCUUCC | 7203 | GGAAGCCGAGUCUGGCCAU |
| siRNA 1714 | 1714 | UGGCCAGACUCGGCUUCCA | 7204 | UGGAAGCCGAGUCUGGCCA |
| siRNA 1715 | 1715 | GGCCAGACUCGGCUUCCAG | 7205 | CUGGAAGCCGAGUCUGGCC |
| siRNA 1716 | 1716 | GCCAGACUCGGCUUCCAGG | 7206 | CCUGGAAGCCGAGUCUGGC |
| siRNA 1717 | 1717 | CCAGACUCGGCUUCCAGGU | 7207 | ACCUGGAAGCCGAGUCUGG |
| siRNA 1718 | 1718 | CAGACUCGGCUUCCAGGUU | 7208 | AACCUGGAAGCCGAGUCUG |
| siRNA 1719 | 1719 | AGACUCGGCUUCCAGGUUA | 7209 | UAACCUGGAAGCCGAGUCU |
| siRNA 1720 | 1720 | GACUCGGCUUCCAGGUUAC | 7210 | GUAACCUGGAAGCCGAGUC |
| siRNA 1721 | 1721 | ACUCGGCUUCCAGGUUACA | 7211 | UGUAACCUGGAAGCCGAGU |
| siRNA 1722 | 1722 | CUCGGCUUCCAGGUUACAG | 7212 | CUGUAACCUGGAAGCCGAG |
| siRNA 1723 | 1723 | UCGGCUUCCAGGUUACAGU | 7213 | ACUGUAACCUGGAAGCCGA |
| siRNA 1724 | 1724 | CGGCUUCCAGGUUACAGUA | 7214 | UACUGUAACCUGGAAGCCG |
| siRNA 1725 | 1725 | GGCUUCCAGGUUACAGUAG | 7215 | CUACUGUAACCUGGAAGCC |
| siRNA 1726 | 1726 | GCUUCCAGGUUACAGUAGU | 7216 | ACUACUGUAACCUGGAAGC |
| siRNA 1727 | 1727 | CUUCCAGGUUACAGUAGUG | 7217 | CACUACUGUAACCUGGAAG |
| siRNA 1728 | 1728 | UUCCAGGUUACAGUAGUGC | 7218 | GCACUACUGUAACCUGGAA |
| siRNA 1729 | 1729 | UCCAGGUUACAGUAGUGCA | 7219 | UGCACUACUGUAACCUGGA |
| siRNA 1730 | 1730 | CCAGGUUACAGUAGUGCAG | 7220 | CUGCACUACUGUAACCUGG |
| siRNA 1731 | 1731 | CAGGUUACAGUAGUGCAGA | 7221 | UCUGCACUACUGUAACCUG |
| siRNA 1732 | 1732 | AGGUUACAGUAGUGCAGAA | 7222 | UUCUGCACUACUGUAACCU |
| siRNA 1733 | 1733 | GGUUACAGUAGUGCAGAAU | 7223 | AUUCUGCACUACUGUAACC |
| siRNA 1734 | 1734 | GUUACAGUAGUGCAGAAUA | 7224 | UAUUCUGCACUACUGUAAC |
| siRNA 1735 | 1735 | UUACAGUAGUGCAGAAUAC | 7225 | GUAUUCUGCACUACUGUAA |
| siRNA 1736 | 1736 | UACAGUAGUGCAGAAUACA | 7226 | UGUAUUCUGCACUACUGUA |
| siRNA 1737 | 1737 | ACAGUAGUGCAGAAUACAG | 7227 | CUGUAUUCUGCACUACUGU |
| siRNA 1738 | 1738 | CAGUAGUGCAGAAUACAGG | 7228 | CCUGUAUUCUGCACUACUG |
| siRNA 1739 | 1739 | AGUAGUGCAGAAUACAGGU | 7229 | ACCUGUAUUCUGCACUACU |
| siRNA 1740 | 1740 | GUAGUGCAGAAUACAGGUU | 7230 | AACCUGUAUUCUGCACUAC |
| siRNA 1741 | 1741 | UAGUGCAGAAUACAGGUUA | 7231 | UAACCUGUAUUCUGCACUA |
| siRNA 1742 | 1742 | AGUGCAGAAUACAGGUUAA | 7232 | UUAACCUGUAUUCUGCACU |
| siRNA 1743 | 1743 | GUGCAGAAUACAGGUUAAA | 7233 | UUUAACCUGUAUUCUGCAC |
| siRNA 1744 | 1744 | UGCAGAAUACAGGUUAAAA | 7234 | UUUUAACCUGUAUUCUGCA |
| siRNA 1745 | 1745 | GCAGAAUACAGGUUAAAAG | 7235 | CUUUUAACCUGUAUUCUGC |
| siRNA 1746 | 1746 | CAGAAUACAGGUUAAAAGA | 7236 | UCUUUUAACCUGUAUUCUG |
| siRNA 1747 | 1747 | AGAAUACAGGUUAAAAGAA | 7237 | UUCUUUUAACCUGUAUUCU |
| siRNA 1748 | 1748 | GAAUACAGGUUAAAAGAAA | 7238 | UUUCUUUUAACCUGUAUUC |
| siRNA 1749 | 1749 | AAUACAGGUUAAAAGAAAA | 7239 | UUUUCUUUUAACCUGUAUU |
| siRNA 1750 | 1750 | AUACAGGUUAAAAGAAAAA | 7240 | UUUUUCUUUUAACCUGUAU |
| siRNA 1751 | 1751 | UACAGGUUAAAAGAAAAAU | 7241 | AUUUUUCUUUUAACCUGUA |
| siRNA 1752 | 1752 | ACAGGUUAAAAGAAAAAUU | 7242 | AAUUUUUCUUUUAACCUGU |
| siRNA 1753 | 1753 | CAGGUUAAAAGAAAAAUUU | 7243 | AAAUUUUUCUUUUAACCUG |
| siRNA 1754 | 1754 | AGGUUAAAAGAAAAAUUUG | 7244 | CAAAUUUUUCUUUUAACCU |
| siRNA 1755 | 1755 | GGUUAAAAGAAAAAUUUGU | 7245 | ACAAAUUUUUCUUUUAACC |
| siRNA 1756 | 1756 | GUUAAAAGAAAAAUUUGUC | 7246 | GACAAAUUUUUCUUUUAAC |
| siRNA 1757 | 1757 | UUAAAAGAAAAAUUUGUCA | 7247 | UGACAAAUUUUUCUUUUAA |
| siRNA 1758 | 1758 | UAAAAGAAAAAUUUGUCAU | 7248 | AUGACAAAUUUUUCUUUUA |
| siRNA 1759 | 1759 | AAAAGAAAAAUUUGUCAUG | 7249 | CAUGACAAAUUUUUCUUUU |
| siRNA 1760 | 1760 | AAAGAAAAAUUUGUCAUGA | 7250 | UCAUGACAAAUUUUUCUUU |
| siRNA 1761 | 1761 | AAGAAAAAUUUGUCAUGAG | 7251 | CUCAUGACAAAUUUUUCUU |
| siRNA 1762 | 1762 | AGAAAAAUUUGUCAUGAGG | 7252 | CCUCAUGACAAAUUUUUCU |
| siRNA 1763 | 1763 | GAAAAAUUUGUCAUGAGGA | 7253 | UCCUCAUGACAAAUUUUUC |
| siRNA 1764 | 1764 | AAAAAUUUGUCAUGAGGAA | 7254 | UUCCUCAUGACAAAUUUUU |
| siRNA 1765 | 1765 | AAAAUUUGUCAUGAGGAAA | 7255 | UUUCCUCAUGACAAAUUUU |
| siRNA 1766 | 1766 | AAAUUUGUCAUGAGGAAAA | 7256 | UUUUCCUCAUGACAAAUUU |
| siRNA 1767 | 1767 | AAUUUGUCAUGAGGAAAAU | 7257 | AUUUUCCUCAUGACAAAUU |
| siRNA 1768 | 1768 | AUUUGUCAUGAGGAAAAUA | 7258 | UAUUUUCCUCAUGACAAAU |
| siRNA 1769 | 1769 | UUUGUCAUGAGGAAAAUAC | 7259 | GUAUUUUCCUCAUGACAAA |
| siRNA 1770 | 1770 | UUGUCAUGAGGAAAAUACA | 7260 | UGUAUUUUCCUCAUGACAA |
| siRNA 1771 | 1771 | UGUCAUGAGGAAAAUACAA | 7261 | UUGUAUUUUCCUCAUGACA |
| siRNA 1772 | 1772 | GUCAUGAGGAAAAUACAAA | 7262 | UUUGUAUUUUCCUCAUGAC |
| siRNA 1773 | 1773 | UCAUGAGGAAAAUACAAAU | 7263 | AUUUGUAUUUUCCUCAUGA |
| siRNA 1774 | 1774 | CAUGAGGAAAAUACAAAUU | 7264 | AAUUUGUAUUUUCCUCAUG |
| siRNA 1775 | 1775 | AUGAGGAAAAUACAAAUUU | 7265 | AAAUUUGUAUUUUCCUCAU |
| siRNA 1776 | 1776 | UGAGGAAAAUACAAAUUUG | 7266 | CAAAUUUGUAUUUUCCUCA |
| siRNA 1777 | 1777 | GAGGAAAAUACAAAUUUGU | 7267 | ACAAAUUUGUAUUUUCCUC |
| siRNA 1778 | 1778 | AGGAAAAUACAAAUUUGUG | 7268 | CACAAAUUUGUAUUUUCCU |
| siRNA 1779 | 1779 | GGAAAAUACAAAUUUGUGA | 7269 | UCACAAAUUUGUAUUUUCC |
| siRNA 1780 | 1780 | GAAAAUACAAAUUUGUGAU | 7270 | AUCACAAAUUUGUAUUUUC |
| siRNA 1781 | 1781 | AAAAUACAAAUUUGUGAUA | 7271 | UAUCACAAAUUUGUAUUUU |
| siRNA 1782 | 1782 | AAAUACAAAUUUGUGAUAA | 7272 | UUAUCACAAAUUUGUAUUU |
| siRNA 1783 | 1783 | AAUACAAAUUUGUGAUAAA | 7273 | UUUAUCACAAAUUUGUAUU |
| siRNA 1784 | 1784 | AUACAAAUUUGUGAUAAAG | 7274 | CUUUAUCACAAAUUUGUAU |
| siRNA 1785 | 1785 | UACAAAUUUGUGAUAAAGA | 7275 | UCUUUAUCACAAAUUUGUA |
| siRNA 1786 | 1786 | ACAAAUUUGUGAUAAAGAA | 7276 | UUCUUUAUCACAAAUUUGU |
| siRNA 1787 | 1787 | CAAAUUUGUGAUAAAGAAG | 7277 | CUUCUUUAUCACAAAUUUG |
| siRNA 1788 | 1788 | AAAUUUGUGAUAAAGAAGA | 7278 | UCUUCUUUAUCACAAAUUU |
| siRNA 1789 | 1789 | AAUUUGUGAUAAAGAAGAU | 7279 | AUCUUCUUUAUCACAAAUU |
| siRNA 1790 | 1790 | AUUUGUGAUAAAGAAGAUA | 7280 | UAUCUUCUUUAUCACAAAU |
| siRNA 1791 | 1791 | UUUGUGAUAAAGAAGAUAC | 7281 | GUAUCUUCUUUAUCACAAA |
| siRNA 1792 | 1792 | UUGUGAUAAAGAAGAUACU | 7282 | AGUAUCUUCUUUAUCACAA |
| siRNA 1793 | 1793 | UGUGAUAAAGAAGAUACUU | 7283 | AAGUAUCUUCUUUAUCACA |
| siRNA 1794 | 1794 | GUGAUAAAGAAGAUACUUG | 7284 | CAAGUAUCUUCUUUAUCAC |
| siRNA 1795 | 1795 | UGAUAAAGAAGAUACUUGU | 7285 | ACAAGUAUCUUCUUUAUCA |
| siRNA 1796 | 1796 | GAUAAAGAAGAUACUUGUG | 7286 | CACAAGUAUCUUCUUUAUC |
| siRNA 1797 | 1797 | AUAAAGAAGAUACUUGUGA | 7287 | UCACAAGUAUCUUCUUUAU |
| siRNA 1798 | 1798 | UAAAGAAGAUACUUGUGAG | 7288 | CUCACAAGUAUCUUCUUUA |
| siRNA 1799 | 1799 | AAAGAAGAUACUUGUGAGC | 7289 | GCUCACAAGUAUCUUCUUU |
| siRNA 1800 | 1800 | AAGAAGAUACUUGUGAGCA | 7290 | UGCUCACAAGUAUCUUCUU |
| siRNA 1801 | 1801 | AGAAGAUACUUGUGAGCAC | 7291 | GUGCUCACAAGUAUCUUCU |
| siRNA 1802 | 1802 | GAAGAUACUUGUGAGCACA | 7292 | UGUGCUCACAAGUAUCUUC |
| siRNA 1803 | 1803 | AAGAUACUUGUGAGCACAA | 7293 | UUGUGCUCACAAGUAUCUU |
| siRNA 1804 | 1804 | AGAUACUUGUGAGCACAAG | 7294 | CUUGUGCUCACAAGUAUCU |
| siRNA 1805 | 1805 | GAUACUUGUGAGCACAAGC | 7295 | GCUUGUGCUCACAAGUAUC |
| siRNA 1806 | 1806 | AUACUUGUGAGCACAAGCA | 7296 | UGCUUGUGCUCACAAGUAU |
| siRNA 1807 | 1807 | UACUUGUGAGCACAAGCAU | 7297 | AUGCUUGUGCUCACAAGUA |
| siRNA 1808 | 1808 | ACUUGUGAGCACAAGCAUG | 7298 | CAUGCUUGUGCUCACAAGU |
| siRNA 1809 | 1809 | CUUGUGAGCACAAGCAUGC | 7299 | GCAUGCUUGUGCUCACAAG |
| siRNA 1810 | 1810 | UUGUGAGCACAAGCAUGCA | 7300 | UGCAUGCUUGUGCUCACAA |
| siRNA 1811 | 1811 | UGUGAGCACAAGCAUGCAU | 7301 | AUGCAUGCUUGUGCUCACA |
| siRNA 1812 | 1812 | GUGAGCACAAGCAUGCAUU | 7302 | AAUGCAUGCUUGUGCUCAC |
| siRNA 1813 | 1813 | UGAGCACAAGCAUGCAUUU | 7303 | AAAUGCAUGCUUGUGCUCA |
| siRNA 1814 | 1814 | GAGCACAAGCAUGCAUUUG | 7304 | CAAAUGCAUGCUUGUGCUC |
| siRNA 1815 | 1815 | AGCACAAGCAUGCAUUUGA | 7305 | UCAAAUGCAUGCUUGUGCU |
| siRNA 1816 | 1816 | GCACAAGCAUGCAUUUGAA | 7306 | UUCAAAUGCAUGCUUGUGC |
| siRNA 1817 | 1817 | CACAAGCAUGCAUUUGAAU | 7307 | AUUCAAAUGCAUGCUUGUG |
| siRNA 1818 | 1818 | ACAAGCAUGCAUUUGAAUU | 7308 | AAUUCAAAUGCAUGCUUGU |
| siRNA 1819 | 1819 | CAAGCAUGCAUUUGAAUUA | 7309 | UAAUUCAAAUGCAUGCUUG |
| siRNA 1820 | 1820 | AAGCAUGCAUUUGAAUUAG | 7310 | CUAAUUCAAAUGCAUGCUU |
| siRNA 1821 | 1821 | AGCAUGCAUUUGAAUUAGU | 7311 | ACUAAUUCAAAUGCAUGCU |
| siRNA 1822 | 1822 | GCAUGCAUUUGAAUUAGUA | 7312 | UACUAAUUCAAAUGCAUGC |
| siRNA 1823 | 1823 | CAUGCAUUUGAAUUAGUAU | 7313 | AUACUAAUUCAAAUGCAUG |
| siRNA 1824 | 1824 | AUGCAUUUGAAUUAGUAUC | 7314 | GAUACUAAUUCAAAUGCAU |
| siRNA 1825 | 1825 | UGCAUUUGAAUUAGUAUCC | 7315 | GGAUACUAAUUCAAAUGCA |
| siRNA 1826 | 1826 | GCAUUUGAAUUAGUAUCCA | 7316 | UGGAUACUAAUUCAAAUGC |
| siRNA 1827 | 1827 | CAUUUGAAUUAGUAUCCAA | 7317 | UUGGAUACUAAUUCAAAUG |
| siRNA 1828 | 1828 | AUUUGAAUUAGUAUCCAAA | 7318 | UUUGGAUACUAAUUCAAAU |
| siRNA 1829 | 1829 | UUUGAAUUAGUAUCCAAAG | 7319 | CUUUGGAUACUAAUUCAAA |
| siRNA 1830 | 1830 | UUGAAUUAGUAUCCAAAGA | 7320 | UCUUUGGAUACUAAUUCAA |
| siRNA 1831 | 1831 | UGAAUUAGUAUCCAAAGAU | 7321 | AUCUUUGGAUACUAAUUCA |
| siRNA 1832 | 1832 | GAAUUAGUAUCCAAAGAUG | 7322 | CAUCUUUGGAUACUAAUUC |
| siRNA 1833 | 1833 | AAUUAGUAUCCAAAGAUGA | 7323 | UCAUCUUUGGAUACUAAUU |
| siRNA 1834 | 1834 | AUUAGUAUCCAAAGAUGAG | 7324 | CUCAUCUUUGGAUACUAAU |
| siRNA 1835 | 1835 | UUAGUAUCCAAAGAUGAGA | 7325 | UCUCAUCUUUGGAUACUAA |
| siRNA 1836 | 1836 | UAGUAUCCAAAGAUGAGAA | 7326 | UUCUCAUCUUUGGAUACUA |
| siRNA 1837 | 1837 | AGUAUCCAAAGAUGAGAAC | 7327 | GUUCUCAUCUUUGGAUACU |
| siRNA 1838 | 1838 | GUAUCCAAAGAUGAGAACA | 7328 | UGUUCUCAUCUUUGGAUAC |
| siRNA 1839 | 1839 | UAUCCAAAGAUGAGAACAG | 7329 | CUGUUCUCAUCUUUGGAUA |
| siRNA 1840 | 1840 | AUCCAAAGAUGAGAACAGC | 7330 | GCUGUUCUCAUCUUUGGAU |
| siRNA 1841 | 1841 | UCCAAAGAUGAGAACAGCA | 7331 | UGCUGUUCUCAUCUUUGGA |
| siRNA 1842 | 1842 | CCAAAGAUGAGAACAGCAU | 7332 | AUGCUGUUCUCAUCUUUGG |
| siRNA 1843 | 1843 | CAAAGAUGAGAACAGCAUA | 7333 | UAUGCUGUUCUCAUCUUUG |
| siRNA 1844 | 1844 | AAAGAUGAGAACAGCAUAA | 7334 | UUAUGCUGUUCUCAUCUUU |
| siRNA 1845 | 1845 | AAGAUGAGAACAGCAUAAU | 7335 | AUUAUGCUGUUCUCAUCUU |
| siRNA 1846 | 1846 | AGAUGAGAACAGCAUAAUA | 7336 | UAUUAUGCUGUUCUCAUCU |
| siRNA 1847 | 1847 | GAUGAGAACAGCAUAAUAU | 7337 | AUAUUAUGCUGUUCUCAUC |
| siRNA 1848 | 1848 | AUGAGAACAGCAUAAUAUU | 7338 | AAUAUUAUGCUGUUCUCAU |
| siRNA 1849 | 1849 | UGAGAACAGCAUAAUAUUU | 7339 | AAAUAUUAUGCUGUUCUCA |
| siRNA 1850 | 1850 | GAGAACAGCAUAAUAUUUG | 7340 | CAAAUAUUAUGCUGUUCUC |
| siRNA 1851 | 1851 | AGAACAGCAUAAUAUUUGC | 7341 | GCAAAUAUUAUGCUGUUCU |
| siRNA 1852 | 1852 | GAACAGCAUAAUAUUUGCU | 7342 | AGCAAAUAUUAUGCUGUUC |
| siRNA 1853 | 1853 | AACAGCAUAAUAUUUGCUG | 7343 | CAGCAAAUAUUAUGCUGUU |
| siRNA 1854 | 1854 | ACAGCAUAAUAUUUGCUGC | 7344 | GCAGCAAAUAUUAUGCUGU |
| siRNA 1855 | 1855 | CAGCAUAAUAUUUGCUGCU | 7345 | AGCAGCAAAUAUUAUGCUG |
| siRNA 1856 | 1856 | AGCAUAAUAUUUGCUGCUA | 7346 | UAGCAGCAAAUAUUAUGCU |
| siRNA 1857 | 1857 | GCAUAAUAUUUGCUGCUAA | 7347 | UUAGCAGCAAAUAUUAUGC |
| siRNA 1858 | 1858 | CAUAAUAUUUGCUGCUAAG | 7348 | CUUAGCAGCAAAUAUUAUG |
| siRNA 1859 | 1859 | AUAAUAUUUGCUGCUAAGU | 7349 | ACUUAGCAGCAAAUAUUAU |
| siRNA 1860 | 1860 | UAAUAUUUGCUGCUAAGUC | 7350 | GACUUAGCAGCAAAUAUUA |
| siRNA 1861 | 1861 | AAUAUUUGCUGCUAAGUCU | 7351 | AGACUUAGCAGCAAAUAUU |
| siRNA 1862 | 1862 | AUAUUUGCUGCUAAGUCUG | 7352 | CAGACUUAGCAGCAAAUAU |
| siRNA 1863 | 1863 | UAUUUGCUGCUAAGUCUGC | 7353 | GCAGACUUAGCAGCAAAUA |
| siRNA 1864 | 1864 | AUUUGCUGCUAAGUCUGCU | 7354 | AGCAGACUUAGCAGCAAAU |
| siRNA 1865 | 1865 | UUUGCUGCUAAGUCUGCUG | 7355 | CAGCAGACUUAGCAGCAAA |
| siRNA 1866 | 1866 | UUGCUGCUAAGUCUGCUGA | 7356 | UCAGCAGACUUAGCAGCAA |
| siRNA 1867 | 1867 | UGCUGCUAAGUCUGCUGAA | 7357 | UUCAGCAGACUUAGCAGCA |
| siRNA 1868 | 1868 | GCUGCUAAGUCUGCUGAAG | 7358 | CUUCAGCAGACUUAGCAGC |
| siRNA 1869 | 1869 | CUGCUAAGUCUGCUGAAGA | 7359 | UCUUCAGCAGACUUAGCAG |
| siRNA 1870 | 1870 | UGCUAAGUCUGCUGAAGAA | 7360 | UUCUUCAGCAGACUUAGCA |
| siRNA 1871 | 1871 | GCUAAGUCUGCUGAAGAAA | 7361 | UUUCUUCAGCAGACUUAGC |
| siRNA 1872 | 1872 | CUAAGUCUGCUGAAGAAAA | 7362 | UUUUCUUCAGCAGACUUAG |
| siRNA 1873 | 1873 | UAAGUCUGCUGAAGAAAAA | 7363 | UUUUUCUUCAGCAGACUUA |
| siRNA 1874 | 1874 | AAGUCUGCUGAAGAAAAAA | 7364 | UUUUUUCUUCAGCAGACUU |
| siRNA 1875 | 1875 | AGUCUGCUGAAGAAAAAAA | 7365 | UUUUUUUCUUCAGCAGACU |
| siRNA 1876 | 1876 | GUCUGCUGAAGAAAAAAAC | 7366 | GUUUUUUUCUUCAGCAGAC |
| siRNA 1877 | 1877 | UCUGCUGAAGAAAAAAACA | 7367 | UGUUUUUUUCUUCAGCAGA |
| siRNA 1878 | 1878 | CUGCUGAAGAAAAAAACAA | 7368 | UUGUUUUUUUCUUCAGCAG |
| siRNA 1879 | 1879 | UGCUGAAGAAAAAAACAAC | 7369 | GUUGUUUUUUUCUUCAGCA |
| siRNA 1880 | 1880 | GCUGAAGAAAAAAACAACU | 7370 | AGUUGUUUUUUUCUUCAGC |
| siRNA 1881 | 1881 | CUGAAGAAAAAAACAACUG | 7371 | CAGUUGUUUUUUUCUUCAG |
| siRNA 1882 | 1882 | UGAAGAAAAAAACAACUGG | 7372 | CCAGUUGUUUUUUUCUUCA |
| siRNA 1883 | 1883 | GAAGAAAAAAACAACUGGA | 7373 | UCCAGUUGUUUUUUUCUUC |
| siRNA 1884 | 1884 | AAGAAAAAAACAACUGGAU | 7374 | AUCCAGUUGUUUUUUUCUU |
| siRNA 1885 | 1885 | AGAAAAAAACAACUGGAUG | 7375 | CAUCCAGUUGUUUUUUUCU |
| siRNA 1886 | 1886 | GAAAAAAACAACUGGAUGG | 7376 | CCAUCCAGUUGUUUUUUUC |
| siRNA 1887 | 1887 | AAAAAAACAACUGGAUGGC | 7377 | GCCAUCCAGUUGUUUUUUU |
| siRNA 1888 | 1888 | AAAAAACAACUGGAUGGCA | 7378 | UGCCAUCCAGUUGUUUUUU |
| siRNA 1889 | 1889 | AAAAACAACUGGAUGGCAG | 7379 | CUGCCAUCCAGUUGUUUUU |
| siRNA 1890 | 1890 | AAAACAACUGGAUGGCAGC | 7380 | GCUGCCAUCCAGUUGUUUU |
| siRNA 1891 | 1891 | AAACAACUGGAUGGCAGCC | 7381 | GGCUGCCAUCCAGUUGUUU |
| siRNA 1892 | 1892 | AACAACUGGAUGGCAGCCC | 7382 | GGGCUGCCAUCCAGUUGUU |
| siRNA 1893 | 1893 | ACAACUGGAUGGCAGCCCU | 7383 | AGGGCUGCCAUCCAGUUGU |
| siRNA 1894 | 1894 | CAACUGGAUGGCAGCCCUU | 7384 | AAGGGCUGCCAUCCAGUUG |
| siRNA 1895 | 1895 | AACUGGAUGGCAGCCCUUA | 7385 | UAAGGGCUGCCAUCCAGUU |
| siRNA 1896 | 1896 | ACUGGAUGGCAGCCCUUAU | 7386 | AUAAGGGCUGCCAUCCAGU |
| siRNA 1897 | 1897 | CUGGAUGGCAGCCCUUAUU | 7387 | AAUAAGGGCUGCCAUCCAG |
| siRNA 1898 | 1898 | UGGAUGGCAGCCCUUAUUU | 7388 | AAAUAAGGGCUGCCAUCCA |
| siRNA 1899 | 1899 | GGAUGGCAGCCCUUAUUUC | 7389 | GAAAUAAGGGCUGCCAUCC |
| siRNA 1900 | 1900 | GAUGGCAGCCCUUAUUUCU | 7390 | AGAAAUAAGGGCUGCCAUC |
| siRNA 1901 | 1901 | AUGGCAGCCCUUAUUUCUC | 7391 | GAGAAAUAAGGGCUGCCAU |
| siRNA 1902 | 1902 | UGGCAGCCCUUAUUUCUCU | 7392 | AGAGAAAUAAGGGCUGCCA |
| siRNA 1903 | 1903 | GGCAGCCCUUAUUUCUCUU | 7393 | AAGAGAAAUAAGGGCUGCC |
| siRNA 1904 | 1904 | GCAGCCCUUAUUUCUCUUC | 7394 | GAAGAGAAAUAAGGGCUGC |
| siRNA 1905 | 1905 | CAGCCCUUAUUUCUCUUCA | 7395 | UGAAGAGAAAUAAGGGCUG |
| siRNA 1906 | 1906 | AGCCCUUAUUUCUCUUCAU | 7396 | AUGAAGAGAAAUAAGGGCU |
| siRNA 1907 | 1907 | GCCCUUAUUUCUCUUCAUU | 7397 | AAUGAAGAGAAAUAAGGGC |
| siRNA 1908 | 1908 | CCCUUAUUUCUCUUCAUUA | 7398 | UAAUGAAGAGAAAUAAGGG |
| siRNA 1909 | 1909 | CCUUAUUUCUCUUCAUUAU | 7399 | AUAAUGAAGAGAAAUAAGG |
| siRNA 1910 | 1910 | CUUAUUUCUCUUCAUUAUC | 7400 | GAUAAUGAAGAGAAAUAAG |
| siRNA 1911 | 1911 | UUAUUUCUCUUCAUUAUCG | 7401 | CGAUAAUGAAGAGAAAUAA |
| siRNA 1912 | 1912 | UAUUUCUCUUCAUUAUCGU | 7402 | ACGAUAAUGAAGAGAAAUA |
| siRNA 1913 | 1913 | AUUUCUCUUCAUUAUCGUA | 7403 | UACGAUAAUGAAGAGAAAU |
| siRNA 1914 | 1914 | UUUCUCUUCAUUAUCGUAG | 7404 | CUACGAUAAUGAAGAGAAA |
| siRNA 1915 | 1915 | UUCUCUUCAUUAUCGUAGU | 7405 | ACUACGAUAAUGAAGAGAA |
| siRNA 1916 | 1916 | UCUCUUCAUUAUCGUAGUA | 7406 | UACUACGAUAAUGAAGAGA |
| siRNA 1917 | 1917 | CUCUUCAUUAUCGUAGUAC | 7407 | GUACUACGAUAAUGAAGAG |
| siRNA 1918 | 1918 | UCUUCAUUAUCGUAGUACU | 7408 | AGUACUACGAUAAUGAAGA |
| siRNA 1919 | 1919 | CUUCAUUAUCGUAGUACUC | 7409 | GAGUACUACGAUAAUGAAG |
| siRNA 1920 | 1920 | UUCAUUAUCGUAGUACUCU | 7410 | AGAGUACUACGAUAAUGAA |
| siRNA 1921 | 1921 | UCAUUAUCGUAGUACUCUA | 7411 | UAGAGUACUACGAUAAUGA |
| siRNA 1922 | 1922 | CAUUAUCGUAGUACUCUAG | 7412 | CUAGAGUACUACGAUAAUG |
| siRNA 1923 | 1923 | AUUAUCGUAGUACUCUAGA | 7413 | UCUAGAGUACUACGAUAAU |
| siRNA 1924 | 1924 | UUAUCGUAGUACUCUAGAU | 7414 | AUCUAGAGUACUACGAUAA |
| siRNA 1925 | 1925 | UAUCGUAGUACUCUAGAUC | 7415 | GAUCUAGAGUACUACGAUA |
| siRNA 1926 | 1926 | AUCGUAGUACUCUAGAUCG | 7416 | CGAUCUAGAGUACUACGAU |
| siRNA 1927 | 1927 | UCGUAGUACUCUAGAUCGA | 7417 | UCGAUCUAGAGUACUACGA |
| siRNA 1928 | 1928 | CGUAGUACUCUAGAUCGAA | 7418 | UUCGAUCUAGAGUACUACG |
| siRNA 1929 | 1929 | GUAGUACUCUAGAUCGAAU | 7419 | AUUCGAUCUAGAGUACUAC |
| siRNA 1930 | 1930 | UAGUACUCUAGAUCGAAUG | 7420 | CAUUCGAUCUAGAGUACUA |
| siRNA 1931 | 1931 | AGUACUCUAGAUCGAAUGU | 7421 | ACAUUCGAUCUAGAGUACU |
| siRNA 1932 | 1932 | GUACUCUAGAUCGAAUGUU | 7422 | AACAUUCGAUCUAGAGUAC |
| siRNA 1933 | 1933 | UACUCUAGAUCGAAUGUUA | 7423 | UAACAUUCGAUCUAGAGUA |
| siRNA 1934 | 1934 | ACUCUAGAUCGAAUGUUAG | 7424 | CUAACAUUCGAUCUAGAGU |
| siRNA 1935 | 1935 | CUCUAGAUCGAAUGUUAGA | 7425 | UCUAACAUUCGAUCUAGAG |
| siRNA 1936 | 1936 | UCUAGAUCGAAUGUUAGAU | 7426 | AUCUAACAUUCGAUCUAGA |
| siRNA 1937 | 1937 | CUAGAUCGAAUGUUAGAUU | 7427 | AAUCUAACAUUCGAUCUAG |
| siRNA 1938 | 1938 | UAGAUCGAAUGUUAGAUUC | 7428 | GAAUCUAACAUUCGAUCUA |
| siRNA 1939 | 1939 | AGAUCGAAUGUUAGAUUCA | 7429 | UGAAUCUAACAUUCGAUCU |
| siRNA 1940 | 1940 | GAUCGAAUGUUAGAUUCAG | 7430 | CUGAAUCUAACAUUCGAUC |
| siRNA 1941 | 1941 | AUCGAAUGUUAGAUUCAGU | 7431 | ACUGAAUCUAACAUUCGAU |
| siRNA 1942 | 1942 | UCGAAUGUUAGAUUCAGUA | 7432 | UACUGAAUCUAACAUUCGA |
| siRNA 1943 | 1943 | CGAAUGUUAGAUUCAGUAU | 7433 | AUACUGAAUCUAACAUUCG |
| siRNA 1944 | 1944 | GAAUGUUAGAUUCAGUAUU | 7434 | AAUACUGAAUCUAACAUUC |
| siRNA 1945 | 1945 | AAUGUUAGAUUCAGUAUUA | 7435 | UAAUACUGAAUCUAACAUU |
| siRNA 1946 | 1946 | AUGUUAGAUUCAGUAUUAU | 7436 | AUAAUACUGAAUCUAACAU |
| siRNA 1947 | 1947 | UGUUAGAUUCAGUAUUAUU | 7437 | AAUAAUACUGAAUCUAACA |
| siRNA 1948 | 1948 | GUUAGAUUCAGUAUUAUUG | 7438 | CAAUAAUACUGAAUCUAAC |
| siRNA 1949 | 1949 | UUAGAUUCAGUAUUAUUGA | 7439 | UCAAUAAUACUGAAUCUAA |
| siRNA 1950 | 1950 | UAGAUUCAGUAUUAUUGAA | 7440 | UUCAAUAAUACUGAAUCUA |
| siRNA 1951 | 1951 | AGAUUCAGUAUUAUUGAAA | 7441 | UUUCAAUAAUACUGAAUCU |
| siRNA 1952 | 1952 | GAUUCAGUAUUAUUGAAAG | 7442 | CUUUCAAUAAUACUGAAUC |
| siRNA 1953 | 1953 | AUUCAGUAUUAUUGAAAGA | 7443 | UCUUUCAAUAAUACUGAAU |
| siRNA 1954 | 1954 | UUCAGUAUUAUUGAAAGAA | 7444 | UUCUUUCAAUAAUACUGAA |
| siRNA 1955 | 1955 | UCAGUAUUAUUGAAAGAAG | 7445 | CUUCUUUCAAUAAUACUGA |
| siRNA 1956 | 1956 | CAGUAUUAUUGAAAGAAGA | 7446 | UCUUCUUUCAAUAAUACUG |
| siRNA 1957 | 1957 | AGUAUUAUUGAAAGAAGAA | 7447 | UUCUUCUUUCAAUAAUACU |
| siRNA 1958 | 1958 | GUAUUAUUGAAAGAAGAAA | 7448 | UUUCUUCUUUCAAUAAUAC |
| siRNA 1959 | 1959 | UAUUAUUGAAAGAAGAAAA | 7449 | UUUUCUUCUUUCAAUAAUA |
| siRNA 1960 | 1960 | AUUAUUGAAAGAAGAAAAU | 7450 | AUUUUCUUCUUUCAAUAAU |
| siRNA 1961 | 1961 | UUAUUGAAAGAAGAAAAUG | 7451 | CAUUUUCUUCUUUCAAUAA |
| siRNA 1962 | 1962 | UAUUGAAAGAAGAAAAUGA | 7452 | UCAUUUUCUUCUUUCAAUA |
| siRNA 1963 | 1963 | AUUGAAAGAAGAAAAUGAG | 7453 | CUCAUUUUCUUCUUUCAAU |
| siRNA 1964 | 1964 | UUGAAAGAAGAAAAUGAGC | 7454 | GCUCAUUUUCUUCUUUCAA |
| siRNA 1965 | 1965 | UGAAAGAAGAAAAUGAGCA | 7455 | UGCUCAUUUUCUUCUUUCA |
| siRNA 1966 | 1966 | GAAAGAAGAAAAUGAGCAA | 7456 | UUGCUCAUUUUCUUCUUUC |
| siRNA 1967 | 1967 | AAAGAAGAAAAUGAGCAAC | 7457 | GUUGCUCAUUUUCUUCUUU |
| siRNA 1968 | 1968 | AAGAAGAAAAUGAGCAACC | 7458 | GGUUGCUCAUUUUCUUCUU |
| siRNA 1969 | 1969 | AGAAGAAAAUGAGCAACCA | 7459 | UGGUUGCUCAUUUUCUUCU |
| siRNA 1970 | 1970 | GAAGAAAAUGAGCAACCAC | 7460 | GUGGUUGCUCAUUUUCUUC |
| siRNA 1971 | 1971 | AAGAAAAUGAGCAACCACU | 7461 | AGUGGUUGCUCAUUUUCUU |
| siRNA 1972 | 1972 | AGAAAAUGAGCAACCACUG | 7462 | CAGUGGUUGCUCAUUUUCU |
| siRNA 1973 | 1973 | GAAAAUGAGCAACCACUGA | 7463 | UCAGUGGUUGCUCAUUUUC |
| siRNA 1974 | 1974 | AAAAUGAGCAACCACUGAG | 7464 | CUCAGUGGUUGCUCAUUUU |
| siRNA 1975 | 1975 | AAAUGAGCAACCACUGAGA | 7465 | UCUCAGUGGUUGCUCAUUU |
| siRNA 1976 | 1976 | AAUGAGCAACCACUGAGAU | 7466 | AUCUCAGUGGUUGCUCAUU |
| siRNA 1977 | 1977 | AUGAGCAACCACUGAGAUU | 7467 | AAUCUCAGUGGUUGCUCAU |
| siRNA 1978 | 1978 | UGAGCAACCACUGAGAUUA | 7468 | UAAUCUCAGUGGUUGCUCA |
| siRNA 1979 | 1979 | GAGCAACCACUGAGAUUAC | 7469 | GUAAUCUCAGUGGUUGCUC |
| siRNA 1980 | 1980 | AGCAACCACUGAGAUUACC | 7470 | GGUAAUCUCAGUGGUUGCU |
| siRNA 1981 | 1981 | GCAACCACUGAGAUUACCA | 7471 | UGGUAAUCUCAGUGGUUGC |
| siRNA 1982 | 1982 | CAACCACUGAGAUUACCAA | 7472 | UUGGUAAUCUCAGUGGUUG |
| siRNA 1983 | 1983 | AACCACUGAGAUUACCAAG | 7473 | CUUGGUAAUCUCAGUGGUU |
| siRNA 1984 | 1984 | ACCACUGAGAUUACCAAGU | 7474 | ACUUGGUAAUCUCAGUGGU |
| siRNA 1985 | 1985 | CCACUGAGAUUACCAAGUC | 7475 | GACUUGGUAAUCUCAGUGG |
| siRNA 1986 | 1986 | CACUGAGAUUACCAAGUCC | 7476 | GGACUUGGUAAUCUCAGUG |
| siRNA 1987 | 1987 | ACUGAGAUUACCAAGUCCU | 7477 | AGGACUUGGUAAUCUCAGU |
| siRNA 1988 | 1988 | CUGAGAUUACCAAGUCCUG | 7478 | CAGGACUUGGUAAUCUCAG |
| siRNA 1989 | 1989 | UGAGAUUACCAAGUCCUGA | 7479 | UCAGGACUUGGUAAUCUCA |
| siRNA 1990 | 1990 | GAGAUUACCAAGUCCUGAA | 7480 | UUCAGGACUUGGUAAUCUC |
| siRNA 1991 | 1991 | AGAUUACCAAGUCCUGAAG | 7481 | CUUCAGGACUUGGUAAUCU |
| siRNA 1992 | 1992 | GAUUACCAAGUCCUGAAGU | 7482 | ACUUCAGGACUUGGUAAUC |
| siRNA 1993 | 1993 | AUUACCAAGUCCUGAAGUA | 7483 | UACUUCAGGACUUGGUAAU |
| siRNA 1994 | 1994 | UUACCAAGUCCUGAAGUAU | 7484 | AUACUUCAGGACUUGGUAA |
| siRNA 1995 | 1995 | UACCAAGUCCUGAAGUAUA | 7485 | UAUACUUCAGGACUUGGUA |
| siRNA 1996 | 1996 | ACCAAGUCCUGAAGUAUAU | 7486 | AUAUACUUCAGGACUUGGU |
| siRNA 1997 | 1997 | CCAAGUCCUGAAGUAUAUC | 7487 | GAUAUACUUCAGGACUUGG |
| siRNA 1998 | 1998 | CAAGUCCUGAAGUAUAUCG | 7488 | CGAUAUACUUCAGGACUUG |
| siRNA 1999 | 1999 | AAGUCCUGAAGUAUAUCGU | 7489 | ACGAUAUACUUCAGGACUU |
| siRNA 2000 | 2000 | AGUCCUGAAGUAUAUCGUU | 7490 | AACGAUAUACUUCAGGACU |
| siRNA 2001 | 2001 | GUCCUGAAGUAUAUCGUUU | 7491 | AAACGAUAUACUUCAGGAC |
| siRNA 2002 | 2002 | UCCUGAAGUAUAUCGUUUU | 7492 | AAAACGAUAUACUUCAGGA |
| siRNA 2003 | 2003 | CCUGAAGUAUAUCGUUUUG | 7493 | CAAAACGAUAUACUUCAGG |
| siRNA 2004 | 2004 | CUGAAGUAUAUCGUUUUGU | 7494 | ACAAAACGAUAUACUUCAG |
| siRNA 2005 | 2005 | UGAAGUAUAUCGUUUUGUA | 7495 | UACAAAACGAUAUACUUCA |
| siRNA 2006 | 2006 | GAAGUAUAUCGUUUUGUAG | 7496 | CUACAAAACGAUAUACUUC |
| siRNA 2007 | 2007 | AAGUAUAUCGUUUUGUAGU | 7497 | ACUACAAAACGAUAUACUU |
| siRNA 2008 | 2008 | AGUAUAUCGUUUUGUAGUA | 7498 | UACUACAAAACGAUAUACU |
| siRNA 2009 | 2009 | GUAUAUCGUUUUGUAGUAA | 7499 | UUACUACAAAACGAUAUAC |
| siRNA 2010 | 2010 | UAUAUCGUUUUGUAGUAAA | 7500 | UUUACUACAAAACGAUAUA |
| siRNA 2011 | 2011 | AUAUCGUUUUGUAGUAAAA | 7501 | UUUUACUACAAAACGAUAU |
| siRNA 2012 | 2012 | UAUCGUUUUGUAGUAAAAG | 7502 | CUUUUACUACAAAACGAUA |
| siRNA 2013 | 2013 | AUCGUUUUGUAGUAAAAGA | 7503 | UCUUUUACUACAAAACGAU |
| siRNA 2014 | 2014 | UCGUUUUGUAGUAAAAGAC | 7504 | GUCUUUUACUACAAAACGA |
| siRNA 2015 | 2015 | CGUUUUGUAGUAAAAGACU | 7505 | AGUCUUUUACUACAAAACG |
| siRNA 2016 | 2016 | GUUUUGUAGUAAAAGACUC | 7506 | GAGUCUUUUACUACAAAAC |
| siRNA 2017 | 2017 | UUUUGUAGUAAAAGACUCU | 7507 | AGAGUCUUUUACUACAAAA |
| siRNA 2018 | 2018 | UUUGUAGUAAAAGACUCUG | 7508 | CAGAGUCUUUUACUACAAA |
| siRNA 2019 | 2019 | UUGUAGUAAAAGACUCUGA | 7509 | UCAGAGUCUUUUACUACAA |
| siRNA 2020 | 2020 | UGUAGUAAAAGACUCUGAG | 7510 | CUCAGAGUCUUUUACUACA |
| siRNA 2021 | 2021 | GUAGUAAAAGACUCUGAGG | 7511 | CCUCAGAGUCUUUUACUAC |
| siRNA 2022 | 2022 | UAGUAAAAGACUCUGAGGA | 7512 | UCCUCAGAGUCUUUUACUA |
| siRNA 2023 | 2023 | AGUAAAAGACUCUGAGGAA | 7513 | UUCCUCAGAGUCUUUUACU |
| siRNA 2024 | 2024 | GUAAAAGACUCUGAGGAAA | 7514 | UUUCCUCAGAGUCUUUUAC |
| siRNA 2025 | 2025 | UAAAAGACUCUGAGGAAAA | 7515 | UUUUCCUCAGAGUCUUUUA |
| siRNA 2026 | 2026 | AAAAGACUCUGAGGAAAAC | 7516 | GUUUUCCUCAGAGUCUUUU |
| siRNA 2027 | 2027 | AAAGACUCUGAGGAAAACA | 7517 | UGUUUUCCUCAGAGUCUUU |
| siRNA 2028 | 2028 | AAGACUCUGAGGAAAACAU | 7518 | AUGUUUUCCUCAGAGUCUU |
| siRNA 2029 | 2029 | AGACUCUGAGGAAAACAUU | 7519 | AAUGUUUUCCUCAGAGUCU |
| siRNA 2030 | 2030 | GACUCUGAGGAAAACAUUG | 7520 | CAAUGUUUUCCUCAGAGUC |
| siRNA 2031 | 2031 | ACUCUGAGGAAAACAUUGU | 7521 | ACAAUGUUUUCCUCAGAGU |
| siRNA 2032 | 2032 | CUCUGAGGAAAACAUUGUU | 7522 | AACAAUGUUUUCCUCAGAG |
| siRNA 2033 | 2033 | UCUGAGGAAAACAUUGUUU | 7523 | AAACAAUGUUUUCCUCAGA |
| siRNA 2034 | 2034 | CUGAGGAAAACAUUGUUUU | 7524 | AAAACAAUGUUUUCCUCAG |
| siRNA 2035 | 2035 | UGAGGAAAACAUUGUUUUU | 7525 | AAAAACAAUGUUUUCCUCA |
| siRNA 2036 | 2036 | GAGGAAAACAUUGUUUUUG | 7526 | CAAAAACAAUGUUUUCCUC |
| siRNA 2037 | 2037 | AGGAAAACAUUGUUUUUGA | 7527 | UCAAAAACAAUGUUUUCCU |
| siRNA 2038 | 2038 | GGAAAACAUUGUUUUUGAA | 7528 | UUCAAAAACAAUGUUUUCC |
| siRNA 2039 | 2039 | GAAAACAUUGUUUUUGAAG | 7529 | CUUCAAAAACAAUGUUUUC |
| siRNA 2040 | 2040 | AAAACAUUGUUUUUGAAGA | 7530 | UCUUCAAAAACAAUGUUUU |
| siRNA 2041 | 2041 | AAACAUUGUUUUUGAAGAC | 7531 | GUCUUCAAAAACAAUGUUU |
| siRNA 2042 | 2042 | AACAUUGUUUUUGAAGACA | 7532 | UGUCUUCAAAAACAAUGUU |
| siRNA 2043 | 2043 | ACAUUGUUUUUGAAGACAA | 7533 | UUGUCUUCAAAAACAAUGU |
| siRNA 2044 | 2044 | CAUUGUUUUUGAAGACAAC | 7534 | GUUGUCUUCAAAAACAAUG |
| siRNA 2045 | 2045 | AUUGUUUUUGAAGACAACU | 7535 | AGUUGUCUUCAAAAACAAU |
| siRNA 2046 | 2046 | UUGUUUUUGAAGACAACUU | 7536 | AAGUUGUCUUCAAAAACAA |
| siRNA 2047 | 2047 | UGUUUUUGAAGACAACUUG | 7537 | CAAGUUGUCUUCAAAAACA |
| siRNA 2048 | 2048 | GUUUUUGAAGACAACUUGC | 7538 | GCAAGUUGUCUUCAAAAAC |
| siRNA 2049 | 2049 | UUUUUGAAGACAACUUGCA | 7539 | UGCAAGUUGUCUUCAAAAA |
| siRNA 2050 | 2050 | UUUUGAAGACAACUUGCAA | 7540 | UUGCAAGUUGUCUUCAAAA |
| siRNA 2051 | 2051 | UUUGAAGACAACUUGCAAA | 7541 | UUUGCAAGUUGUCUUCAAA |
| siRNA 2052 | 2052 | UUGAAGACAACUUGCAAAG | 7542 | CUUUGCAAGUUGUCUUCAA |
| siRNA 2053 | 2053 | UGAAGACAACUUGCAAAGU | 7543 | ACUUUGCAAGUUGUCUUCA |
| siRNA 2054 | 2054 | GAAGACAACUUGCAAAGUA | 7544 | UACUUUGCAAGUUGUCUUC |
| siRNA 2055 | 2055 | AAGACAACUUGCAAAGUAG | 7545 | CUACUUUGCAAGUUGUCUU |
| siRNA 2056 | 2056 | AGACAACUUGCAAAGUAGA | 7546 | UCUACUUUGCAAGUUGUCU |
| siRNA 2057 | 2057 | GACAACUUGCAAAGUAGAA | 7547 | UUCUACUUUGCAAGUUGUC |
| siRNA 2058 | 2058 | ACAACUUGCAAAGUAGAAG | 7548 | CUUCUACUUUGCAAGUUGU |
| siRNA 2059 | 2059 | CAACUUGCAAAGUAGAAGU | 7549 | ACUUCUACUUUGCAAGUUG |
| siRNA 2060 | 2060 | AACUUGCAAAGUAGAAGUG | 7550 | CACUUCUACUUUGCAAGUU |
| siRNA 2061 | 2061 | ACUUGCAAAGUAGAAGUGG | 7551 | CCACUUCUACUUUGCAAGU |
| siRNA 2062 | 2062 | CUUGCAAAGUAGAAGUGGC | 7552 | GCCACUUCUACUUUGCAAG |
| siRNA 2063 | 2063 | UUGCAAAGUAGAAGUGGCA | 7553 | UGCCACUUCUACUUUGCAA |
| siRNA 2064 | 2064 | UGCAAAGUAGAAGUGGCAU | 7554 | AUGCCACUUCUACUUUGCA |
| siRNA 2065 | 2065 | GCAAAGUAGAAGUGGCAUC | 7555 | GAUGCCACUUCUACUUUGC |
| siRNA 2066 | 2066 | CAAAGUAGAAGUGGCAUCC | 7556 | GGAUGCCACUUCUACUUUG |
| siRNA 2067 | 2067 | AAAGUAGAAGUGGCAUCCC | 7557 | GGGAUGCCACUUCUACUUU |
| siRNA 2068 | 2068 | AAGUAGAAGUGGCAUCCCC | 7558 | GGGGAUGCCACUUCUACUU |
| siRNA 2069 | 2069 | AGUAGAAGUGGCAUCCCCA | 7559 | UGGGGAUGCCACUUCUACU |
| siRNA 2070 | 2070 | GUAGAAGUGGCAUCCCCAU | 7560 | AUGGGGAUGCCACUUCUAC |
| siRNA 2071 | 2071 | UAGAAGUGGCAUCCCCAUU | 7561 | AAUGGGGAUGCCACUUCUA |
| siRNA 2072 | 2072 | AGAAGUGGCAUCCCCAUUA | 7562 | UAAUGGGGAUGCCACUUCU |
| siRNA 2073 | 2073 | GAAGUGGCAUCCCCAUUAU | 7563 | AUAAUGGGGAUGCCACUUC |
| siRNA 2074 | 2074 | AAGUGGCAUCCCCAUUAUU | 7564 | AAUAAUGGGGAUGCCACUU |
| siRNA 2075 | 2075 | AGUGGCAUCCCCAUUAUUA | 7565 | UAAUAAUGGGGAUGCCACU |
| siRNA 2076 | 2076 | GUGGCAUCCCCAUUAUUAA | 7566 | UUAAUAAUGGGGAUGCCAC |
| siRNA 2077 | 2077 | UGGCAUCCCCAUUAUUAAA | 7567 | UUUAAUAAUGGGGAUGCCA |
| siRNA 2078 | 2078 | GGCAUCCCCAUUAUUAAAG | 7568 | CUUUAAUAAUGGGGAUGCC |
| siRNA 2079 | 2079 | GCAUCCCCAUUAUUAAAGG | 7569 | CCUUUAAUAAUGGGGAUGC |
| siRNA 2080 | 2080 | CAUCCCCAUUAUUAAAGGA | 7570 | UCCUUUAAUAAUGGGGAUG |
| siRNA 2081 | 2081 | AUCCCCAUUAUUAAAGGAG | 7571 | CUCCUUUAAUAAUGGGGAU |
| siRNA 2082 | 2082 | UCCCCAUUAUUAAAGGAGG | 7572 | CCUCCUUUAAUAAUGGGGA |
| siRNA 2083 | 2083 | CCCCAUUAUUAAAGGAGGA | 7573 | UCCUCCUUUAAUAAUGGGG |
| siRNA 2084 | 2084 | CCCAUUAUUAAAGGAGGAA | 7574 | UUCCUCCUUUAAUAAUGGG |
| siRNA 2085 | 2085 | CCAUUAUUAAAGGAGGAAC | 7575 | GUUCCUCCUUUAAUAAUGG |
| siRNA 2086 | 2086 | CAUUAUUAAAGGAGGAACU | 7576 | AGUUCCUCCUUUAAUAAUG |
| siRNA 2087 | 2087 | AUUAUUAAAGGAGGAACUG | 7577 | CAGUUCCUCCUUUAAUAAU |
| siRNA 2088 | 2088 | UUAUUAAAGGAGGAACUGU | 7578 | ACAGUUCCUCCUUUAAUAA |
| siRNA 2089 | 2089 | UAUUAAAGGAGGAACUGUA | 7579 | UACAGUUCCUCCUUUAAUA |
| siRNA 2090 | 2090 | AUUAAAGGAGGAACUGUAG | 7580 | CUACAGUUCCUCCUUUAAU |
| siRNA 2091 | 2091 | UUAAAGGAGGAACUGUAGU | 7581 | ACUACAGUUCCUCCUUUAA |
| siRNA 2092 | 2092 | UAAAGGAGGAACUGUAGUG | 7582 | CACUACAGUUCCUCCUUUA |
| siRNA 2093 | 2093 | AAAGGAGGAACUGUAGUGA | 7583 | UCACUACAGUUCCUCCUUU |
| siRNA 2094 | 2094 | AAGGAGGAACUGUAGUGAA | 7584 | UUCACUACAGUUCCUCCUU |
| siRNA 2095 | 2095 | AGGAGGAACUGUAGUGAAA | 7585 | UUUCACUACAGUUCCUCCU |
| siRNA 2096 | 2096 | GGAGGAACUGUAGUGAAAU | 7586 | AUUUCACUACAGUUCCUCC |
| siRNA 2097 | 2097 | GAGGAACUGUAGUGAAAUU | 7587 | AAUUUCACUACAGUUCCUC |
| siRNA 2098 | 2098 | AGGAACUGUAGUGAAAUUA | 7588 | UAAUUUCACUACAGUUCCU |
| siRNA 2099 | 2099 | GGAACUGUAGUGAAAUUAA | 7589 | UUAAUUUCACUACAGUUCC |
| siRNA 2100 | 2100 | GAACUGUAGUGAAAUUAAU | 7590 | AUUAAUUUCACUACAGUUC |
| siRNA 2101 | 2101 | AACUGUAGUGAAAUUAAUU | 7591 | AAUUAAUUUCACUACAGUU |
| siRNA 2102 | 2102 | ACUGUAGUGAAAUUAAUUG | 7592 | CAAUUAAUUUCACUACAGU |
| siRNA 2103 | 2103 | CUGUAGUGAAAUUAAUUGA | 7593 | UCAAUUAAUUUCACUACAG |
| siRNA 2104 | 2104 | UGUAGUGAAAUUAAUUGAA | 7594 | UUCAAUUAAUUUCACUACA |
| siRNA 2105 | 2105 | GUAGUGAAAUUAAUUGAAA | 7595 | UUUCAAUUAAUUUCACUAC |
| siRNA 2106 | 2106 | UAGUGAAAUUAAUUGAAAG | 7596 | CUUUCAAUUAAUUUCACUA |
| siRNA 2107 | 2107 | AGUGAAAUUAAUUGAAAGG | 7597 | CCUUUCAAUUAAUUUCACU |
| siRNA 2108 | 2108 | GUGAAAUUAAUUGAAAGGU | 7598 | ACCUUUCAAUUAAUUUCAC |
| siRNA 2109 | 2109 | UGAAAUUAAUUGAAAGGUU | 7599 | AACCUUUCAAUUAAUUUCA |
| siRNA 2110 | 2110 | GAAAUUAAUUGAAAGGUUA | 7600 | UAACCUUUCAAUUAAUUUC |
| siRNA 2111 | 2111 | AAAUUAAUUGAAAGGUUAA | 7601 | UUAACCUUUCAAUUAAUUU |
| siRNA 2112 | 2112 | AAUUAAUUGAAAGGUUAAC | 7602 | GUUAACCUUUCAAUUAAUU |
| siRNA 2113 | 2113 | AUUAAUUGAAAGGUUAACA | 7603 | UGUUAACCUUUCAAUUAAU |
| siRNA 2114 | 2114 | UUAAUUGAAAGGUUAACAU | 7604 | AUGUUAACCUUUCAAUUAA |
| siRNA 2115 | 2115 | UAAUUGAAAGGUUAACAUA | 7605 | UAUGUUAACCUUUCAAUUA |
| siRNA 2116 | 2116 | AAUUGAAAGGUUAACAUAU | 7606 | AUAUGUUAACCUUUCAAUU |
| siRNA 2117 | 2117 | AUUGAAAGGUUAACAUAUC | 7607 | GAUAUGUUAACCUUUCAAU |
| siRNA 2118 | 2118 | UUGAAAGGUUAACAUAUCA | 7608 | UGAUAUGUUAACCUUUCAA |
| siRNA 2119 | 2119 | UGAAAGGUUAACAUAUCAU | 7609 | AUGAUAUGUUAACCUUUCA |
| siRNA 2120 | 2120 | GAAAGGUUAACAUAUCAUA | 7610 | UAUGAUAUGUUAACCUUUC |
| siRNA 2121 | 2121 | AAAGGUUAACAUAUCAUAU | 7611 | AUAUGAUAUGUUAACCUUU |
| siRNA 2122 | 2122 | AAGGUUAACAUAUCAUAUG | 7612 | CAUAUGAUAUGUUAACCUU |
| siRNA 2123 | 2123 | AGGUUAACAUAUCAUAUGU | 7613 | ACAUAUGAUAUGUUAACCU |
| siRNA 2124 | 2124 | GGUUAACAUAUCAUAUGUA | 7614 | UACAUAUGAUAUGUUAACC |
| siRNA 2125 | 2125 | GUUAACAUAUCAUAUGUAU | 7615 | AUACAUAUGAUAUGUUAAC |
| siRNA 2126 | 2126 | UUAACAUAUCAUAUGUAUG | 7616 | CAUACAUAUGAUAUGUUAA |
| siRNA 2127 | 2127 | UAACAUAUCAUAUGUAUGC | 7617 | GCAUACAUAUGAUAUGUUA |
| siRNA 2128 | 2128 | AACAUAUCAUAUGUAUGCA | 7618 | UGCAUACAUAUGAUAUGUU |
| siRNA 2129 | 2129 | ACAUAUCAUAUGUAUGCAG | 7619 | CUGCAUACAUAUGAUAUGU |
| siRNA 2130 | 2130 | CAUAUCAUAUGUAUGCAGA | 7620 | UCUGCAUACAUAUGAUAUG |
| siRNA 2131 | 2131 | AUAUCAUAUGUAUGCAGAU | 7621 | AUCUGCAUACAUAUGAUAU |
| siRNA 2132 | 2132 | UAUCAUAUGUAUGCAGAUC | 7622 | GAUCUGCAUACAUAUGAUA |
| siRNA 2133 | 2133 | AUCAUAUGUAUGCAGAUCC | 7623 | GGAUCUGCAUACAUAUGAU |
| siRNA 2134 | 2134 | UCAUAUGUAUGCAGAUCCC | 7624 | GGGAUCUGCAUACAUAUGA |
| siRNA 2135 | 2135 | CAUAUGUAUGCAGAUCCCA | 7625 | UGGGAUCUGCAUACAUAUG |
| siRNA 2136 | 2136 | AUAUGUAUGCAGAUCCCAA | 7626 | UUGGGAUCUGCAUACAUAU |
| siRNA 2137 | 2137 | UAUGUAUGCAGAUCCCAAU | 7627 | AUUGGGAUCUGCAUACAUA |
| siRNA 2138 | 2138 | AUGUAUGCAGAUCCCAAUU | 7628 | AAUUGGGAUCUGCAUACAU |
| siRNA 2139 | 2139 | UGUAUGCAGAUCCCAAUUU | 7629 | AAAUUGGGAUCUGCAUACA |
| siRNA 2140 | 2140 | GUAUGCAGAUCCCAAUUUU | 7630 | AAAAUUGGGAUCUGCAUAC |
| siRNA 2141 | 2141 | UAUGCAGAUCCCAAUUUUG | 7631 | CAAAAUUGGGAUCUGCAUA |
| siRNA 2142 | 2142 | AUGCAGAUCCCAAUUUUGU | 7632 | ACAAAAUUGGGAUCUGCAU |
| siRNA 2143 | 2143 | UGCAGAUCCCAAUUUUGUU | 7633 | AACAAAAUUGGGAUCUGCA |
| siRNA 2144 | 2144 | GCAGAUCCCAAUUUUGUUC | 7634 | GAACAAAAUUGGGAUCUGC |
| siRNA 2145 | 2145 | CAGAUCCCAAUUUUGUUCG | 7635 | CGAACAAAAUUGGGAUCUG |
| siRNA 2146 | 2146 | AGAUCCCAAUUUUGUUCGU | 7636 | ACGAACAAAAUUGGGAUCU |
| siRNA 2147 | 2147 | GAUCCCAAUUUUGUUCGUA | 7637 | UACGAACAAAAUUGGGAUC |
| siRNA 2148 | 2148 | AUCCCAAUUUUGUUCGUAC | 7638 | GUACGAACAAAAUUGGGAU |
| siRNA 2149 | 2149 | UCCCAAUUUUGUUCGUACU | 7639 | AGUACGAACAAAAUUGGGA |
| siRNA 2150 | 2150 | CCCAAUUUUGUUCGUACUU | 7640 | AAGUACGAACAAAAUUGGG |
| siRNA 2151 | 2151 | CCAAUUUUGUUCGUACUUU | 7641 | AAAGUACGAACAAAAUUGG |
| siRNA 2152 | 2152 | CAAUUUUGUUCGUACUUUU | 7642 | AAAAGUACGAACAAAAUUG |
| siRNA 2153 | 2153 | AAUUUUGUUCGUACUUUUC | 7643 | GAAAAGUACGAACAAAAUU |
| siRNA 2154 | 2154 | AUUUUGUUCGUACUUUUCU | 7644 | AGAAAAGUACGAACAAAAU |
| siRNA 2155 | 2155 | UUUUGUUCGUACUUUUCUU | 7645 | AAGAAAAGUACGAACAAAA |
| siRNA 2156 | 2156 | UUUGUUCGUACUUUUCUUA | 7646 | UAAGAAAAGUACGAACAAA |
| siRNA 2157 | 2157 | UUGUUCGUACUUUUCUUAC | 7647 | GUAAGAAAAGUACGAACAA |
| siRNA 2158 | 2158 | UGUUCGUACUUUUCUUACC | 7648 | GGUAAGAAAAGUACGAACA |
| siRNA 2159 | 2159 | GUUCGUACUUUUCUUACCA | 7649 | UGGUAAGAAAAGUACGAAC |
| siRNA 2160 | 2160 | UUCGUACUUUUCUUACCAC | 7650 | GUGGUAAGAAAAGUACGAA |
| siRNA 2161 | 2161 | UCGUACUUUUCUUACCACA | 7651 | UGUGGUAAGAAAAGUACGA |
| siRNA 2162 | 2162 | CGUACUUUUCUUACCACAU | 7652 | AUGUGGUAAGAAAAGUACG |
| siRNA 2163 | 2163 | GUACUUUUCUUACCACAUA | 7653 | UAUGUGGUAAGAAAAGUAC |
| siRNA 2164 | 2164 | UACUUUUCUUACCACAUAU | 7654 | AUAUGUGGUAAGAAAAGUA |
| siRNA 2165 | 2165 | ACUUUUCUUACCACAUAUC | 7655 | GAUAUGUGGUAAGAAAAGU |
| siRNA 2166 | 2166 | CUUUUCUUACCACAUAUCG | 7656 | CGAUAUGUGGUAAGAAAAG |
| siRNA 2167 | 2167 | UUUUCUUACCACAUAUCGU | 7657 | ACGAUAUGUGGUAAGAAAA |
| siRNA 2168 | 2168 | UUUCUUACCACAUAUCGUU | 7658 | AACGAUAUGUGGUAAGAAA |
| siRNA 2169 | 2169 | UUCUUACCACAUAUCGUUC | 7659 | GAACGAUAUGUGGUAAGAA |
| siRNA 2170 | 2170 | UCUUACCACAUAUCGUUCA | 7660 | UGAACGAUAUGUGGUAAGA |
| siRNA 2171 | 2171 | CUUACCACAUAUCGUUCAU | 7661 | AUGAACGAUAUGUGGUAAG |
| siRNA 2172 | 2172 | UUACCACAUAUCGUUCAUU | 7662 | AAUGAACGAUAUGUGGUAA |
| siRNA 2173 | 2173 | UACCACAUAUCGUUCAUUU | 7663 | AAAUGAACGAUAUGUGGUA |
| siRNA 2174 | 2174 | ACCACAUAUCGUUCAUUUU | 7664 | AAAAUGAACGAUAUGUGGU |
| siRNA 2175 | 2175 | CCACAUAUCGUUCAUUUUG | 7665 | CAAAAUGAACGAUAUGUGG |
| siRNA 2176 | 2176 | CACAUAUCGUUCAUUUUGU | 7666 | ACAAAAUGAACGAUAUGUG |
| siRNA 2177 | 2177 | ACAUAUCGUUCAUUUUGUA | 7667 | UACAAAAUGAACGAUAUGU |
| siRNA 2178 | 2178 | CAUAUCGUUCAUUUUGUAA | 7668 | UUACAAAAUGAACGAUAUG |
| siRNA 2179 | 2179 | AUAUCGUUCAUUUUGUAAA | 7669 | UUUACAAAAUGAACGAUAU |
| siRNA 2180 | 2180 | UAUCGUUCAUUUUGUAAAC | 7670 | GUUUACAAAAUGAACGAUA |
| siRNA 2181 | 2181 | AUCGUUCAUUUUGUAAACC | 7671 | GGUUUACAAAAUGAACGAU |
| siRNA 2182 | 2182 | UCGUUCAUUUUGUAAACCA | 7672 | UGGUUUACAAAAUGAACGA |
| siRNA 2183 | 2183 | CGUUCAUUUUGUAAACCAC | 7673 | GUGGUUUACAAAAUGAACG |
| siRNA 2184 | 2184 | GUUCAUUUUGUAAACCACA | 7674 | UGUGGUUUACAAAAUGAAC |
| siRNA 2185 | 2185 | UUCAUUUUGUAAACCACAG | 7675 | CUGUGGUUUACAAAAUGAA |
| siRNA 2186 | 2186 | UCAUUUUGUAAACCACAGG | 7676 | CCUGUGGUUUACAAAAUGA |
| siRNA 2187 | 2187 | CAUUUUGUAAACCACAGGA | 7677 | UCCUGUGGUUUACAAAAUG |
| siRNA 2188 | 2188 | AUUUUGUAAACCACAGGAA | 7678 | UUCCUGUGGUUUACAAAAU |
| siRNA 2189 | 2189 | UUUUGUAAACCACAGGAAU | 7679 | AUUCCUGUGGUUUACAAAA |
| siRNA 2190 | 2190 | UUUGUAAACCACAGGAAUU | 7680 | AAUUCCUGUGGUUUACAAA |
| siRNA 2191 | 2191 | UUGUAAACCACAGGAAUUG | 7681 | CAAUUCCUGUGGUUUACAA |
| siRNA 2192 | 2192 | UGUAAACCACAGGAAUUGC | 7682 | GCAAUUCCUGUGGUUUACA |
| siRNA 2193 | 2193 | GUAAACCACAGGAAUUGCU | 7683 | AGCAAUUCCUGUGGUUUAC |
| siRNA 2194 | 2194 | UAAACCACAGGAAUUGCUG | 7684 | CAGCAAUUCCUGUGGUUUA |
| siRNA 2195 | 2195 | AAACCACAGGAAUUGCUGA | 7685 | UCAGCAAUUCCUGUGGUUU |
| siRNA 2196 | 2196 | AACCACAGGAAUUGCUGAG | 7686 | CUCAGCAAUUCCUGUGGUU |
| siRNA 2197 | 2197 | ACCACAGGAAUUGCUGAGC | 7687 | GCUCAGCAAUUCCUGUGGU |
| siRNA 2198 | 2198 | CCACAGGAAUUGCUGAGCU | 7688 | AGCUCAGCAAUUCCUGUGG |
| siRNA 2199 | 2199 | CACAGGAAUUGCUGAGCUU | 7689 | AAGCUCAGCAAUUCCUGUG |
| siRNA 2200 | 2200 | ACAGGAAUUGCUGAGCUUA | 7690 | UAAGCUCAGCAAUUCCUGU |
| siRNA 2201 | 2201 | CAGGAAUUGCUGAGCUUAC | 7691 | GUAAGCUCAGCAAUUCCUG |
| siRNA 2202 | 2202 | AGGAAUUGCUGAGCUUACU | 7692 | AGUAAGCUCAGCAAUUCCU |
| siRNA 2203 | 2203 | GGAAUUGCUGAGCUUACUG | 7693 | CAGUAAGCUCAGCAAUUCC |
| siRNA 2204 | 2204 | GAAUUGCUGAGCUUACUGA | 7694 | UCAGUAAGCUCAGCAAUUC |
| siRNA 2205 | 2205 | AAUUGCUGAGCUUACUGAU | 7695 | AUCAGUAAGCUCAGCAAUU |
| siRNA 2206 | 2206 | AUUGCUGAGCUUACUGAUU | 7696 | AAUCAGUAAGCUCAGCAAU |
| siRNA 2207 | 2207 | UUGCUGAGCUUACUGAUUG | 7697 | CAAUCAGUAAGCUCAGCAA |
| siRNA 2208 | 2208 | UGCUGAGCUUACUGAUUGA | 7698 | UCAAUCAGUAAGCUCAGCA |
| siRNA 2209 | 2209 | GCUGAGCUUACUGAUUGAA | 7699 | UUCAAUCAGUAAGCUCAGC |
| siRNA 2210 | 2210 | CUGAGCUUACUGAUUGAAC | 7700 | GUUCAAUCAGUAAGCUCAG |
| siRNA 2211 | 2211 | UGAGCUUACUGAUUGAACG | 7701 | CGUUCAAUCAGUAAGCUCA |
| siRNA 2212 | 2212 | GAGCUUACUGAUUGAACGG | 7702 | CCGUUCAAUCAGUAAGCUC |
| siRNA 2213 | 2213 | AGCUUACUGAUUGAACGGU | 7703 | ACCGUUCAAUCAGUAAGCU |
| siRNA 2214 | 2214 | GCUUACUGAUUGAACGGUU | 7704 | AACCGUUCAAUCAGUAAGC |
| siRNA 2215 | 2215 | CUUACUGAUUGAACGGUUU | 7705 | AAACCGUUCAAUCAGUAAG |
| siRNA 2216 | 2216 | UUACUGAUUGAACGGUUUG | 7706 | CAAACCGUUCAAUCAGUAA |
| siRNA 2217 | 2217 | UACUGAUUGAACGGUUUGA | 7707 | UCAAACCGUUCAAUCAGUA |
| siRNA 2218 | 2218 | ACUGAUUGAACGGUUUGAA | 7708 | UUCAAACCGUUCAAUCAGU |
| siRNA 2219 | 2219 | CUGAUUGAACGGUUUGAAA | 7709 | UUUCAAACCGUUCAAUCAG |
| siRNA 2220 | 2220 | UGAUUGAACGGUUUGAAAU | 7710 | AUUUCAAACCGUUCAAUCA |
| siRNA 2221 | 2221 | GAUUGAACGGUUUGAAAUU | 7711 | AAUUUCAAACCGUUCAAUC |
| siRNA 2222 | 2222 | AUUGAACGGUUUGAAAUUC | 7712 | GAAUUUCAAACCGUUCAAU |
| siRNA 2223 | 2223 | UUGAACGGUUUGAAAUUCC | 7713 | GGAAUUUCAAACCGUUCAA |
| siRNA 2224 | 2224 | UGAACGGUUUGAAAUUCCA | 7714 | UGGAAUUUCAAACCGUUCA |
| siRNA 2225 | 2225 | GAACGGUUUGAAAUUCCAG | 7715 | CUGGAAUUUCAAACCGUUC |
| siRNA 2226 | 2226 | AACGGUUUGAAAUUCCAGA | 7716 | UCUGGAAUUUCAAACCGUU |
| siRNA 2227 | 2227 | ACGGUUUGAAAUUCCAGAG | 7717 | CUCUGGAAUUUCAAACCGU |
| siRNA 2228 | 2228 | CGGUUUGAAAUUCCAGAGC | 7718 | GCUCUGGAAUUUCAAACCG |
| siRNA 2229 | 2229 | GGUUUGAAAUUCCAGAGCC | 7719 | GGCUCUGGAAUUUCAAACC |
| siRNA 2230 | 2230 | GUUUGAAAUUCCAGAGCCA | 7720 | UGGCUCUGGAAUUUCAAAC |
| siRNA 2231 | 2231 | UUUGAAAUUCCAGAGCCAG | 7721 | CUGGCUCUGGAAUUUCAAA |
| siRNA 2232 | 2232 | UUGAAAUUCCAGAGCCAGA | 7722 | UCUGGCUCUGGAAUUUCAA |
| siRNA 2233 | 2233 | UGAAAUUCCAGAGCCAGAA | 7723 | UUCUGGCUCUGGAAUUUCA |
| siRNA 2234 | 2234 | GAAAUUCCAGAGCCAGAAC | 7724 | GUUCUGGCUCUGGAAUUUC |
| siRNA 2235 | 2235 | AAAUUCCAGAGCCAGAACC | 7725 | GGUUCUGGCUCUGGAAUUU |
| siRNA 2236 | 2236 | AAUUCCAGAGCCAGAACCU | 7726 | AGGUUCUGGCUCUGGAAUU |
| siRNA 2237 | 2237 | AUUCCAGAGCCAGAACCUA | 7727 | UAGGUUCUGGCUCUGGAAU |
| siRNA 2238 | 2238 | UUCCAGAGCCAGAACCUAC | 7728 | GUAGGUUCUGGCUCUGGAA |
| siRNA 2239 | 2239 | UCCAGAGCCAGAACCUACU | 7729 | AGUAGGUUCUGGCUCUGGA |
| siRNA 2240 | 2240 | CCAGAGCCAGAACCUACUG | 7730 | CAGUAGGUUCUGGCUCUGG |
| siRNA 2241 | 2241 | CAGAGCCAGAACCUACUGA | 7731 | UCAGUAGGUUCUGGCUCUG |
| siRNA 2242 | 2242 | AGAGCCAGAACCUACUGAC | 7732 | GUCAGUAGGUUCUGGCUCU |
| siRNA 2243 | 2243 | GAGCCAGAACCUACUGACG | 7733 | CGUCAGUAGGUUCUGGCUC |
| siRNA 2244 | 2244 | AGCCAGAACCUACUGACGC | 7734 | GCGUCAGUAGGUUCUGGCU |
| siRNA 2245 | 2245 | GCCAGAACCUACUGACGCA | 7735 | UGCGUCAGUAGGUUCUGGC |
| siRNA 2246 | 2246 | CCAGAACCUACUGACGCAG | 7736 | CUGCGUCAGUAGGUUCUGG |
| siRNA 2247 | 2247 | CAGAACCUACUGACGCAGA | 7737 | UCUGCGUCAGUAGGUUCUG |
| siRNA 2248 | 2248 | AGAACCUACUGACGCAGAC | 7738 | GUCUGCGUCAGUAGGUUCU |
| siRNA 2249 | 2249 | GAACCUACUGACGCAGACA | 7739 | UGUCUGCGUCAGUAGGUUC |
| siRNA 2250 | 2250 | AACCUACUGACGCAGACAA | 7740 | UUGUCUGCGUCAGUAGGUU |
| siRNA 2251 | 2251 | ACCUACUGACGCAGACAAA | 7741 | UUUGUCUGCGUCAGUAGGU |
| siRNA 2252 | 2252 | CCUACUGACGCAGACAAAU | 7742 | AUUUGUCUGCGUCAGUAGG |
| siRNA 2253 | 2253 | CUACUGACGCAGACAAAUU | 7743 | AAUUUGUCUGCGUCAGUAG |
| siRNA 2254 | 2254 | UACUGACGCAGACAAAUUG | 7744 | CAAUUUGUCUGCGUCAGUA |
| siRNA 2255 | 2255 | ACUGACGCAGACAAAUUGG | 7745 | CCAAUUUGUCUGCGUCAGU |
| siRNA 2256 | 2256 | CUGACGCAGACAAAUUGGC | 7746 | GCCAAUUUGUCUGCGUCAG |
| siRNA 2257 | 2257 | UGACGCAGACAAAUUGGCA | 7747 | UGCCAAUUUGUCUGCGUCA |
| siRNA 2258 | 2258 | GACGCAGACAAAUUGGCAA | 7748 | UUGCCAAUUUGUCUGCGUC |
| siRNA 2259 | 2259 | ACGCAGACAAAUUGGCAAU | 7749 | AUUGCCAAUUUGUCUGCGU |
| siRNA 2260 | 2260 | CGCAGACAAAUUGGCAAUA | 7750 | UAUUGCCAAUUUGUCUGCG |
| siRNA 2261 | 2261 | GCAGACAAAUUGGCAAUAG | 7751 | CUAUUGCCAAUUUGUCUGC |
| siRNA 2262 | 2262 | CAGACAAAUUGGCAAUAGA | 7752 | UCUAUUGCCAAUUUGUCUG |
| siRNA 2263 | 2263 | AGACAAAUUGGCAAUAGAG | 7753 | CUCUAUUGCCAAUUUGUCU |
| siRNA 2264 | 2264 | GACAAAUUGGCAAUAGAGA | 7754 | UCUCUAUUGCCAAUUUGUC |
| siRNA 2265 | 2265 | ACAAAUUGGCAAUAGAGAA | 7755 | UUCUCUAUUGCCAAUUUGU |
| siRNA 2266 | 2266 | CAAAUUGGCAAUAGAGAAA | 7756 | UUUCUCUAUUGCCAAUUUG |
| siRNA 2267 | 2267 | AAAUUGGCAAUAGAGAAAG | 7757 | CUUUCUCUAUUGCCAAUUU |
| siRNA 2268 | 2268 | AAUUGGCAAUAGAGAAAGG | 7758 | CCUUUCUCUAUUGCCAAUU |
| siRNA 2269 | 2269 | AUUGGCAAUAGAGAAAGGC | 7759 | GCCUUUCUCUAUUGCCAAU |
| siRNA 2270 | 2270 | UUGGCAAUAGAGAAAGGCG | 7760 | CGCCUUUCUCUAUUGCCAA |
| siRNA 2271 | 2271 | UGGCAAUAGAGAAAGGCGA | 7761 | UCGCCUUUCUCUAUUGCCA |
| siRNA 2272 | 2272 | GGCAAUAGAGAAAGGCGAG | 7762 | CUCGCCUUUCUCUAUUGCC |
| siRNA 2273 | 2273 | GCAAUAGAGAAAGGCGAGC | 7763 | GCUCGCCUUUCUCUAUUGC |
| siRNA 2274 | 2274 | CAAUAGAGAAAGGCGAGCA | 7764 | UGCUCGCCUUUCUCUAUUG |
| siRNA 2275 | 2275 | AAUAGAGAAAGGCGAGCAG | 7765 | CUGCUCGCCUUUCUCUAUU |
| siRNA 2276 | 2276 | AUAGAGAAAGGCGAGCAGC | 7766 | GCUGCUCGCCUUUCUCUAU |
| siRNA 2277 | 2277 | UAGAGAAAGGCGAGCAGCC | 7767 | GGCUGCUCGCCUUUCUCUA |
| siRNA 2278 | 2278 | AGAGAAAGGCGAGCAGCCA | 7768 | UGGCUGCUCGCCUUUCUCU |
| siRNA 2279 | 2279 | GAGAAAGGCGAGCAGCCAA | 7769 | UUGGCUGCUCGCCUUUCUC |
| siRNA 2280 | 2280 | AGAAAGGCGAGCAGCCAAU | 7770 | AUUGGCUGCUCGCCUUUCU |
| siRNA 2281 | 2281 | GAAAGGCGAGCAGCCAAUC | 7771 | GAUUGGCUGCUCGCCUUUC |
| siRNA 2282 | 2282 | AAAGGCGAGCAGCCAAUCA | 7772 | UGAUUGGCUGCUCGCCUUU |
| siRNA 2283 | 2283 | AAGGCGAGCAGCCAAUCAG | 7773 | CUGAUUGGCUGCUCGCCUU |
| siRNA 2284 | 2284 | AGGCGAGCAGCCAAUCAGU | 7774 | ACUGAUUGGCUGCUCGCCU |
| siRNA 2285 | 2285 | GGCGAGCAGCCAAUCAGUG | 7775 | CACUGAUUGGCUGCUCGCC |
| siRNA 2286 | 2286 | GCGAGCAGCCAAUCAGUGC | 7776 | GCACUGAUUGGCUGCUCGC |
| siRNA 2287 | 2287 | CGAGCAGCCAAUCAGUGCA | 7777 | UGCACUGAUUGGCUGCUCG |
| siRNA 2288 | 2288 | GAGCAGCCAAUCAGUGCAG | 7778 | CUGCACUGAUUGGCUGCUC |
| siRNA 2289 | 2289 | AGCAGCCAAUCAGUGCAGA | 7779 | UCUGCACUGAUUGGCUGCU |
| siRNA 2290 | 2290 | GCAGCCAAUCAGUGCAGAC | 7780 | GUCUGCACUGAUUGGCUGC |
| siRNA 2291 | 2291 | CAGCCAAUCAGUGCAGACC | 7781 | GGUCUGCACUGAUUGGCUG |
| siRNA 2292 | 2292 | AGCCAAUCAGUGCAGACCU | 7782 | AGGUCUGCACUGAUUGGCU |
| siRNA 2293 | 2293 | GCCAAUCAGUGCAGACCUU | 7783 | AAGGUCUGCACUGAUUGGC |
| siRNA 2294 | 2294 | CCAAUCAGUGCAGACCUUA | 7784 | UAAGGUCUGCACUGAUUGG |
| siRNA 2295 | 2295 | CAAUCAGUGCAGACCUUAA | 7785 | UUAAGGUCUGCACUGAUUG |
| siRNA 2296 | 2296 | AAUCAGUGCAGACCUUAAA | 7786 | UUUAAGGUCUGCACUGAUU |
| siRNA 2297 | 2297 | AUCAGUGCAGACCUUAAAA | 7787 | UUUUAAGGUCUGCACUGAU |
| siRNA 2298 | 2298 | UCAGUGCAGACCUUAAAAG | 7788 | CUUUUAAGGUCUGCACUGA |
| siRNA 2299 | 2299 | CAGUGCAGACCUUAAAAGA | 7789 | UCUUUUAAGGUCUGCACUG |
| siRNA 2300 | 2300 | AGUGCAGACCUUAAAAGAU | 7790 | AUCUUUUAAGGUCUGCACU |
| siRNA 2301 | 2301 | GUGCAGACCUUAAAAGAUU | 7791 | AAUCUUUUAAGGUCUGCAC |
| siRNA 2302 | 2302 | UGCAGACCUUAAAAGAUUU | 7792 | AAAUCUUUUAAGGUCUGCA |
| siRNA 2303 | 2303 | GCAGACCUUAAAAGAUUUC | 7793 | GAAAUCUUUUAAGGUCUGC |
| siRNA 2304 | 2304 | CAGACCUUAAAAGAUUUCG | 7794 | CGAAAUCUUUUAAGGUCUG |
| siRNA 2305 | 2305 | AGACCUUAAAAGAUUUCGC | 7795 | GCGAAAUCUUUUAAGGUCU |
| siRNA 2306 | 2306 | GACCUUAAAAGAUUUCGCA | 7796 | UGCGAAAUCUUUUAAGGUC |
| siRNA 2307 | 2307 | ACCUUAAAAGAUUUCGCAA | 7797 | UUGCGAAAUCUUUUAAGGU |
| siRNA 2308 | 2308 | CCUUAAAAGAUUUCGCAAG | 7798 | CUUGCGAAAUCUUUUAAGG |
| siRNA 2309 | 2309 | CUUAAAAGAUUUCGCAAGG | 7799 | CCUUGCGAAAUCUUUUAAG |
| siRNA 2310 | 2310 | UUAAAAGAUUUCGCAAGGA | 7800 | UCCUUGCGAAAUCUUUUAA |
| siRNA 2311 | 2311 | UAAAAGAUUUCGCAAGGAA | 7801 | UUCCUUGCGAAAUCUUUUA |
| siRNA 2312 | 2312 | AAAAGAUUUCGCAAGGAAU | 7802 | AUUCCUUGCGAAAUCUUUU |
| siRNA 2313 | 2313 | AAAGAUUUCGCAAGGAAUA | 7803 | UAUUCCUUGCGAAAUCUUU |
| siRNA 2314 | 2314 | AAGAUUUCGCAAGGAAUAU | 7804 | AUAUUCCUUGCGAAAUCUU |
| siRNA 2315 | 2315 | AGAUUUCGCAAGGAAUAUG | 7805 | CAUAUUCCUUGCGAAAUCU |
| siRNA 2316 | 2316 | GAUUUCGCAAGGAAUAUGU | 7806 | ACAUAUUCCUUGCGAAAUC |
| siRNA 2317 | 2317 | AUUUCGCAAGGAAUAUGUC | 7807 | GACAUAUUCCUUGCGAAAU |
| siRNA 2318 | 2318 | UUUCGCAAGGAAUAUGUCC | 7808 | GGACAUAUUCCUUGCGAAA |
| siRNA 2319 | 2319 | UUCGCAAGGAAUAUGUCCA | 7809 | UGGACAUAUUCCUUGCGAA |
| siRNA 2320 | 2320 | UCGCAAGGAAUAUGUCCAA | 7810 | UUGGACAUAUUCCUUGCGA |
| siRNA 2321 | 2321 | CGCAAGGAAUAUGUCCAAC | 7811 | GUUGGACAUAUUCCUUGCG |
| siRNA 2322 | 2322 | GCAAGGAAUAUGUCCAACC | 7812 | GGUUGGACAUAUUCCUUGC |
| siRNA 2323 | 2323 | CAAGGAAUAUGUCCAACCA | 7813 | UGGUUGGACAUAUUCCUUG |
| siRNA 2324 | 2324 | AAGGAAUAUGUCCAACCAG | 7814 | CUGGUUGGACAUAUUCCUU |
| siRNA 2325 | 2325 | AGGAAUAUGUCCAACCAGU | 7815 | ACUGGUUGGACAUAUUCCU |
| siRNA 2326 | 2326 | GGAAUAUGUCCAACCAGUA | 7816 | UACUGGUUGGACAUAUUCC |
| siRNA 2327 | 2327 | GAAUAUGUCCAACCAGUAC | 7817 | GUACUGGUUGGACAUAUUC |
| siRNA 2328 | 2328 | AAUAUGUCCAACCAGUACA | 7818 | UGUACUGGUUGGACAUAUU |
| siRNA 2329 | 2329 | AUAUGUCCAACCAGUACAA | 7819 | UUGUACUGGUUGGACAUAU |
| siRNA 2330 | 2330 | UAUGUCCAACCAGUACAAC | 7820 | GUUGUACUGGUUGGACAUA |
| siRNA 2331 | 2331 | AUGUCCAACCAGUACAACU | 7821 | AGUUGUACUGGUUGGACAU |
| siRNA 2332 | 2332 | UGUCCAACCAGUACAACUU | 7822 | AAGUUGUACUGGUUGGACA |
| siRNA 2333 | 2333 | GUCCAACCAGUACAACUUA | 7823 | UAAGUUGUACUGGUUGGAC |
| siRNA 2334 | 2334 | UCCAACCAGUACAACUUAG | 7824 | CUAAGUUGUACUGGUUGGA |
| siRNA 2335 | 2335 | CCAACCAGUACAACUUAGG | 7825 | CCUAAGUUGUACUGGUUGG |
| siRNA 2336 | 2336 | CAACCAGUACAACUUAGGA | 7826 | UCCUAAGUUGUACUGGUUG |
| siRNA 2337 | 2337 | AACCAGUACAACUUAGGAU | 7827 | AUCCUAAGUUGUACUGGUU |
| siRNA 2338 | 2338 | ACCAGUACAACUUAGGAUC | 7828 | GAUCCUAAGUUGUACUGGU |
| siRNA 2339 | 2339 | CCAGUACAACUUAGGAUCU | 7829 | AGAUCCUAAGUUGUACUGG |
| siRNA 2340 | 2340 | CAGUACAACUUAGGAUCUU | 7830 | AAGAUCCUAAGUUGUACUG |
| siRNA 2341 | 2341 | AGUACAACUUAGGAUCUUA | 7831 | UAAGAUCCUAAGUUGUACU |
| siRNA 2342 | 2342 | GUACAACUUAGGAUCUUAA | 7832 | UUAAGAUCCUAAGUUGUAC |
| siRNA 2343 | 2343 | UACAACUUAGGAUCUUAAA | 7833 | UUUAAGAUCCUAAGUUGUA |
| siRNA 2344 | 2344 | ACAACUUAGGAUCUUAAAU | 7834 | AUUUAAGAUCCUAAGUUGU |
| siRNA 2345 | 2345 | CAACUUAGGAUCUUAAAUG | 7835 | CAUUUAAGAUCCUAAGUUG |
| siRNA 2346 | 2346 | AACUUAGGAUCUUAAAUGU | 7836 | ACAUUUAAGAUCCUAAGUU |
| siRNA 2347 | 2347 | ACUUAGGAUCUUAAAUGUA | 7837 | UACAUUUAAGAUCCUAAGU |
| siRNA 2348 | 2348 | CUUAGGAUCUUAAAUGUAU | 7838 | AUACAUUUAAGAUCCUAAG |
| siRNA 2349 | 2349 | UUAGGAUCUUAAAUGUAUU | 7839 | AAUACAUUUAAGAUCCUAA |
| siRNA 2350 | 2350 | UAGGAUCUUAAAUGUAUUU | 7840 | AAAUACAUUUAAGAUCCUA |
| siRNA 2351 | 2351 | AGGAUCUUAAAUGUAUUUC | 7841 | GAAAUACAUUUAAGAUCCU |
| siRNA 2352 | 2352 | GGAUCUUAAAUGUAUUUCG | 7842 | CGAAAUACAUUUAAGAUCC |
| siRNA 2353 | 2353 | GAUCUUAAAUGUAUUUCGG | 7843 | CCGAAAUACAUUUAAGAUC |
| siRNA 2354 | 2354 | AUCUUAAAUGUAUUUCGGC | 7844 | GCCGAAAUACAUUUAAGAU |
| siRNA 2355 | 2355 | UCUUAAAUGUAUUUCGGCA | 7845 | UGCCGAAAUACAUUUAAGA |
| siRNA 2356 | 2356 | CUUAAAUGUAUUUCGGCAU | 7846 | AUGCCGAAAUACAUUUAAG |
| siRNA 2357 | 2357 | UUAAAUGUAUUUCGGCAUU | 7847 | AAUGCCGAAAUACAUUUAA |
| siRNA 2358 | 2358 | UAAAUGUAUUUCGGCAUUG | 7848 | CAAUGCCGAAAUACAUUUA |
| siRNA 2359 | 2359 | AAAUGUAUUUCGGCAUUGG | 7849 | CCAAUGCCGAAAUACAUUU |
| siRNA 2360 | 2360 | AAUGUAUUUCGGCAUUGGG | 7850 | CCCAAUGCCGAAAUACAUU |
| siRNA 2361 | 2361 | AUGUAUUUCGGCAUUGGGU | 7851 | ACCCAAUGCCGAAAUACAU |
| siRNA 2362 | 2362 | UGUAUUUCGGCAUUGGGUU | 7852 | AACCCAAUGCCGAAAUACA |
| siRNA 2363 | 2363 | GUAUUUCGGCAUUGGGUUG | 7853 | CAACCCAAUGCCGAAAUAC |
| siRNA 2364 | 2364 | UAUUUCGGCAUUGGGUUGA | 7854 | UCAACCCAAUGCCGAAAUA |
| siRNA 2365 | 2365 | AUUUCGGCAUUGGGUUGAA | 7855 | UUCAACCCAAUGCCGAAAU |
| siRNA 2366 | 2366 | UUUCGGCAUUGGGUUGAAC | 7856 | GUUCAACCCAAUGCCGAAA |
| siRNA 2367 | 2367 | UUCGGCAUUGGGUUGAACA | 7857 | UGUUCAACCCAAUGCCGAA |
| siRNA 2368 | 2368 | UCGGCAUUGGGUUGAACAU | 7858 | AUGUUCAACCCAAUGCCGA |
| siRNA 2369 | 2369 | CGGCAUUGGGUUGAACAUC | 7859 | GAUGUUCAACCCAAUGCCG |
| siRNA 2370 | 2370 | GGCAUUGGGUUGAACAUCA | 7860 | UGAUGUUCAACCCAAUGCC |
| siRNA 2371 | 2371 | GCAUUGGGUUGAACAUCAU | 7861 | AUGAUGUUCAACCCAAUGC |
| siRNA 2372 | 2372 | CAUUGGGUUGAACAUCAUU | 7862 | AAUGAUGUUCAACCCAAUG |
| siRNA 2373 | 2373 | AUUGGGUUGAACAUCAUUU | 7863 | AAAUGAUGUUCAACCCAAU |
| siRNA 2374 | 2374 | UUGGGUUGAACAUCAUUUU | 7864 | AAAAUGAUGUUCAACCCAA |
| siRNA 2375 | 2375 | UGGGUUGAACAUCAUUUUU | 7865 | AAAAAUGAUGUUCAACCCA |
| siRNA 2376 | 2376 | GGGUUGAACAUCAUUUUUA | 7866 | UAAAAAUGAUGUUCAACCC |
| siRNA 2377 | 2377 | GGUUGAACAUCAUUUUUAU | 7867 | AUAAAAAUGAUGUUCAACC |
| siRNA 2378 | 2378 | GUUGAACAUCAUUUUUAUG | 7868 | CAUAAAAAUGAUGUUCAAC |
| siRNA 2379 | 2379 | UUGAACAUCAUUUUUAUGA | 7869 | UCAUAAAAAUGAUGUUCAA |
| siRNA 2380 | 2380 | UGAACAUCAUUUUUAUGAC | 7870 | GUCAUAAAAAUGAUGUUCA |
| siRNA 2381 | 2381 | GAACAUCAUUUUUAUGACU | 7871 | AGUCAUAAAAAUGAUGUUC |
| siRNA 2382 | 2382 | AACAUCAUUUUUAUGACUU | 7872 | AAGUCAUAAAAAUGAUGUU |
| siRNA 2383 | 2383 | ACAUCAUUUUUAUGACUUU | 7873 | AAAGUCAUAAAAAUGAUGU |
| siRNA 2384 | 2384 | CAUCAUUUUUAUGACUUUG | 7874 | CAAAGUCAUAAAAAUGAUG |
| siRNA 2385 | 2385 | AUCAUUUUUAUGACUUUGA | 7875 | UCAAAGUCAUAAAAAUGAU |
| siRNA 2386 | 2386 | UCAUUUUUAUGACUUUGAA | 7876 | UUCAAAGUCAUAAAAAUGA |
| siRNA 2387 | 2387 | CAUUUUUAUGACUUUGAAA | 7877 | UUUCAAAGUCAUAAAAAUG |
| siRNA 2388 | 2388 | AUUUUUAUGACUUUGAAAG | 7878 | CUUUCAAAGUCAUAAAAAU |
| siRNA 2389 | 2389 | UUUUUAUGACUUUGAAAGA | 7879 | UCUUUCAAAGUCAUAAAAA |
| siRNA 2390 | 2390 | UUUUAUGACUUUGAAAGAG | 7880 | CUCUUUCAAAGUCAUAAAA |
| siRNA 2391 | 2391 | UUUAUGACUUUGAAAGAGA | 7881 | UCUCUUUCAAAGUCAUAAA |
| siRNA 2392 | 2392 | UUAUGACUUUGAAAGAGAC | 7882 | GUCUCUUUCAAAGUCAUAA |
| siRNA 2393 | 2393 | UAUGACUUUGAAAGAGACU | 7883 | AGUCUCUUUCAAAGUCAUA |
| siRNA 2394 | 2394 | AUGACUUUGAAAGAGACUU | 7884 | AAGUCUCUUUCAAAGUCAU |
| siRNA 2395 | 2395 | UGACUUUGAAAGAGACUUG | 7885 | CAAGUCUCUUUCAAAGUCA |
| siRNA 2396 | 2396 | GACUUUGAAAGAGACUUGG | 7886 | CCAAGUCUCUUUCAAAGUC |
| siRNA 2397 | 2397 | ACUUUGAAAGAGACUUGGA | 7887 | UCCAAGUCUCUUUCAAAGU |
| siRNA 2398 | 2398 | CUUUGAAAGAGACUUGGAA | 7888 | UUCCAAGUCUCUUUCAAAG |
| siRNA 2399 | 2399 | UUUGAAAGAGACUUGGAAU | 7889 | AUUCCAAGUCUCUUUCAAA |
| siRNA 2400 | 2400 | UUGAAAGAGACUUGGAAUU | 7890 | AAUUCCAAGUCUCUUUCAA |
| siRNA 2401 | 2401 | UGAAAGAGACUUGGAAUUG | 7891 | CAAUUCCAAGUCUCUUUCA |
| siRNA 2402 | 2402 | GAAAGAGACUUGGAAUUGC | 7892 | GCAAUUCCAAGUCUCUUUC |
| siRNA 2403 | 2403 | AAAGAGACUUGGAAUUGCU | 7893 | AGCAAUUCCAAGUCUCUUU |
| siRNA 2404 | 2404 | AAGAGACUUGGAAUUGCUU | 7894 | AAGCAAUUCCAAGUCUCUU |
| siRNA 2405 | 2405 | AGAGACUUGGAAUUGCUUG | 7895 | CAAGCAAUUCCAAGUCUCU |
| siRNA 2406 | 2406 | GAGACUUGGAAUUGCUUGA | 7896 | UCAAGCAAUUCCAAGUCUC |
| siRNA 2407 | 2407 | AGACUUGGAAUUGCUUGAA | 7897 | UUCAAGCAAUUCCAAGUCU |
| siRNA 2408 | 2408 | GACUUGGAAUUGCUUGAAA | 7898 | UUUCAAGCAAUUCCAAGUC |
| siRNA 2409 | 2409 | ACUUGGAAUUGCUUGAAAG | 7899 | CUUUCAAGCAAUUCCAAGU |
| siRNA 2410 | 2410 | CUUGGAAUUGCUUGAAAGA | 7900 | UCUUUCAAGCAAUUCCAAG |
| siRNA 2411 | 2411 | UUGGAAUUGCUUGAAAGAC | 7901 | GUCUUUCAAGCAAUUCCAA |
| siRNA 2412 | 2412 | UGGAAUUGCUUGAAAGACU | 7902 | AGUCUUUCAAGCAAUUCCA |
| siRNA 2413 | 2413 | GGAAUUGCUUGAAAGACUA | 7903 | UAGUCUUUCAAGCAAUUCC |
| siRNA 2414 | 2414 | GAAUUGCUUGAAAGACUAG | 7904 | CUAGUCUUUCAAGCAAUUC |
| siRNA 2415 | 2415 | AAUUGCUUGAAAGACUAGA | 7905 | UCUAGUCUUUCAAGCAAUU |
| siRNA 2416 | 2416 | AUUGCUUGAAAGACUAGAA | 7906 | UUCUAGUCUUUCAAGCAAU |
| siRNA 2417 | 2417 | UUGCUUGAAAGACUAGAAU | 7907 | AUUCUAGUCUUUCAAGCAA |
| siRNA 2418 | 2418 | UGCUUGAAAGACUAGAAUC | 7908 | GAUUCUAGUCUUUCAAGCA |
| siRNA 2419 | 2419 | GCUUGAAAGACUAGAAUCC | 7909 | GGAUUCUAGUCUUUCAAGC |
| siRNA 2420 | 2420 | CUUGAAAGACUAGAAUCCU | 7910 | AGGAUUCUAGUCUUUCAAG |
| siRNA 2421 | 2421 | UUGAAAGACUAGAAUCCUU | 7911 | AAGGAUUCUAGUCUUUCAA |
| siRNA 2422 | 2422 | UGAAAGACUAGAAUCCUUC | 7912 | GAAGGAUUCUAGUCUUUCA |
| siRNA 2423 | 2423 | GAAAGACUAGAAUCCUUCA | 7913 | UGAAGGAUUCUAGUCUUUC |
| siRNA 2424 | 2424 | AAAGACUAGAAUCCUUCAU | 7914 | AUGAAGGAUUCUAGUCUUU |
| siRNA 2425 | 2425 | AAGACUAGAAUCCUUCAUU | 7915 | AAUGAAGGAUUCUAGUCUU |
| siRNA 2426 | 2426 | AGACUAGAAUCCUUCAUUU | 7916 | AAAUGAAGGAUUCUAGUCU |
| siRNA 2427 | 2427 | GACUAGAAUCCUUCAUUUC | 7917 | GAAAUGAAGGAUUCUAGUC |
| siRNA 2428 | 2428 | ACUAGAAUCCUUCAUUUCA | 7918 | UGAAAUGAAGGAUUCUAGU |
| siRNA 2429 | 2429 | CUAGAAUCCUUCAUUUCAA | 7919 | UUGAAAUGAAGGAUUCUAG |
| siRNA 2430 | 2430 | UAGAAUCCUUCAUUUCAAG | 7920 | CUUGAAAUGAAGGAUUCUA |
| siRNA 2431 | 2431 | AGAAUCCUUCAUUUCAAGU | 7921 | ACUUGAAAUGAAGGAUUCU |
| siRNA 2432 | 2432 | GAAUCCUUCAUUUCAAGUG | 7922 | CACUUGAAAUGAAGGAUUC |
| siRNA 2433 | 2433 | AAUCCUUCAUUUCAAGUGU | 7923 | ACACUUGAAAUGAAGGAUU |
| siRNA 2434 | 2434 | AUCCUUCAUUUCAAGUGUA | 7924 | UACACUUGAAAUGAAGGAU |
| siRNA 2435 | 2435 | UCCUUCAUUUCAAGUGUAA | 7925 | UUACACUUGAAAUGAAGGA |
| siRNA 2436 | 2436 | CCUUCAUUUCAAGUGUAAG | 7926 | CUUACACUUGAAAUGAAGG |
| siRNA 2437 | 2437 | CUUCAUUUCAAGUGUAAGA | 7927 | UCUUACACUUGAAAUGAAG |
| siRNA 2438 | 2438 | UUCAUUUCAAGUGUAAGAG | 7928 | CUCUUACACUUGAAAUGAA |
| siRNA 2439 | 2439 | UCAUUUCAAGUGUAAGAGG | 7929 | CCUCUUACACUUGAAAUGA |
| siRNA 2440 | 2440 | CAUUUCAAGUGUAAGAGGG | 7930 | CCCUCUUACACUUGAAAUG |
| siRNA 2441 | 2441 | AUUUCAAGUGUAAGAGGGA | 7931 | UCCCUCUUACACUUGAAAU |
| siRNA 2442 | 2442 | UUUCAAGUGUAAGAGGGAA | 7932 | UUCCCUCUUACACUUGAAA |
| siRNA 2443 | 2443 | UUCAAGUGUAAGAGGGAAA | 7933 | UUUCCCUCUUACACUUGAA |
| siRNA 2444 | 2444 | UCAAGUGUAAGAGGGAAAG | 7934 | CUUUCCCUCUUACACUUGA |
| siRNA 2445 | 2445 | CAAGUGUAAGAGGGAAAGC | 7935 | GCUUUCCCUCUUACACUUG |
| siRNA 2446 | 2446 | AAGUGUAAGAGGGAAAGCU | 7936 | AGCUUUCCCUCUUACACUU |
| siRNA 2447 | 2447 | AGUGUAAGAGGGAAAGCUA | 7937 | UAGCUUUCCCUCUUACACU |
| siRNA 2448 | 2448 | GUGUAAGAGGGAAAGCUAU | 7938 | AUAGCUUUCCCUCUUACAC |
| siRNA 2449 | 2449 | UGUAAGAGGGAAAGCUAUG | 7939 | CAUAGCUUUCCCUCUUACA |
| siRNA 2450 | 2450 | GUAAGAGGGAAAGCUAUGA | 7940 | UCAUAGCUUUCCCUCUUAC |
| siRNA 2451 | 2451 | UAAGAGGGAAAGCUAUGAA | 7941 | UUCAUAGCUUUCCCUCUUA |
| siRNA 2452 | 2452 | AAGAGGGAAAGCUAUGAAA | 7942 | UUUCAUAGCUUUCCCUCUU |
| siRNA 2453 | 2453 | AGAGGGAAAGCUAUGAAAA | 7943 | UUUUCAUAGCUUUCCCUCU |
| siRNA 2454 | 2454 | GAGGGAAAGCUAUGAAAAA | 7944 | UUUUUCAUAGCUUUCCCUC |
| siRNA 2455 | 2455 | AGGGAAAGCUAUGAAAAAA | 7945 | UUUUUUCAUAGCUUUCCCU |
| siRNA 2456 | 2456 | GGGAAAGCUAUGAAAAAAU | 7946 | AUUUUUUCAUAGCUUUCCC |
| siRNA 2457 | 2457 | GGAAAGCUAUGAAAAAAUG | 7947 | CAUUUUUUCAUAGCUUUCC |
| siRNA 2458 | 2458 | GAAAGCUAUGAAAAAAUGG | 7948 | CCAUUUUUUCAUAGCUUUC |
| siRNA 2459 | 2459 | AAAGCUAUGAAAAAAUGGG | 7949 | CCCAUUUUUUCAUAGCUUU |
| siRNA 2460 | 2460 | AAGCUAUGAAAAAAUGGGU | 7950 | ACCCAUUUUUUCAUAGCUU |
| siRNA 2461 | 2461 | AGCUAUGAAAAAAUGGGUA | 7951 | UACCCAUUUUUUCAUAGCU |
| siRNA 2462 | 2462 | GCUAUGAAAAAAUGGGUAG | 7952 | CUACCCAUUUUUUCAUAGC |
| siRNA 2463 | 2463 | CUAUGAAAAAAUGGGUAGA | 7953 | UCUACCCAUUUUUUCAUAG |
| siRNA 2464 | 2464 | UAUGAAAAAAUGGGUAGAG | 7954 | CUCUACCCAUUUUUUCAUA |
| siRNA 2465 | 2465 | AUGAAAAAAUGGGUAGAGU | 7955 | ACUCUACCCAUUUUUUCAU |
| siRNA 2466 | 2466 | UGAAAAAAUGGGUAGAGUC | 7956 | GACUCUACCCAUUUUUUCA |
| siRNA 2467 | 2467 | GAAAAAAUGGGUAGAGUCA | 7957 | UGACUCUACCCAUUUUUUC |
| siRNA 2468 | 2468 | AAAAAAUGGGUAGAGUCAA | 7958 | UUGACUCUACCCAUUUUUU |
| siRNA 2469 | 2469 | AAAAAUGGGUAGAGUCAAU | 7959 | AUUGACUCUACCCAUUUUU |
| siRNA 2470 | 2470 | AAAAUGGGUAGAGUCAAUU | 7960 | AAUUGACUCUACCCAUUUU |
| siRNA 2471 | 2471 | AAAUGGGUAGAGUCAAUUG | 7961 | CAAUUGACUCUACCCAUUU |
| siRNA 2472 | 2472 | AAUGGGUAGAGUCAAUUGC | 7962 | GCAAUUGACUCUACCCAUU |
| siRNA 2473 | 2473 | AUGGGUAGAGUCAAUUGCU | 7963 | AGCAAUUGACUCUACCCAU |
| siRNA 2474 | 2474 | UGGGUAGAGUCAAUUGCUA | 7964 | UAGCAAUUGACUCUACCCA |
| siRNA 2475 | 2475 | GGGUAGAGUCAAUUGCUAA | 7965 | UUAGCAAUUGACUCUACCC |
| siRNA 2476 | 2476 | GGUAGAGUCAAUUGCUAAG | 7966 | CUUAGCAAUUGACUCUACC |
| siRNA 2477 | 2477 | GUAGAGUCAAUUGCUAAGA | 7967 | UCUUAGCAAUUGACUCUAC |
| siRNA 2478 | 2478 | UAGAGUCAAUUGCUAAGAU | 7968 | AUCUUAGCAAUUGACUCUA |
| siRNA 2479 | 2479 | AGAGUCAAUUGCUAAGAUC | 7969 | GAUCUUAGCAAUUGACUCU |
| siRNA 2480 | 2480 | GAGUCAAUUGCUAAGAUCA | 7970 | UGAUCUUAGCAAUUGACUC |
| siRNA 2481 | 2481 | AGUCAAUUGCUAAGAUCAU | 7971 | AUGAUCUUAGCAAUUGACU |
| siRNA 2482 | 2482 | GUCAAUUGCUAAGAUCAUC | 7972 | GAUGAUCUUAGCAAUUGAC |
| siRNA 2483 | 2483 | UCAAUUGCUAAGAUCAUCA | 7973 | UGAUGAUCUUAGCAAUUGA |
| siRNA 2484 | 2484 | CAAUUGCUAAGAUCAUCAG | 7974 | CUGAUGAUCUUAGCAAUUG |
| siRNA 2485 | 2485 | AAUUGCUAAGAUCAUCAGG | 7975 | CCUGAUGAUCUUAGCAAUU |
| siRNA 2486 | 2486 | AUUGCUAAGAUCAUCAGGA | 7976 | UCCUGAUGAUCUUAGCAAU |
| siRNA 2487 | 2487 | UUGCUAAGAUCAUCAGGAG | 7977 | CUCCUGAUGAUCUUAGCAA |
| siRNA 2488 | 2488 | UGCUAAGAUCAUCAGGAGG | 7978 | CCUCCUGAUGAUCUUAGCA |
| siRNA 2489 | 2489 | GCUAAGAUCAUCAGGAGGA | 7979 | UCCUCCUGAUGAUCUUAGC |
| siRNA 2490 | 2490 | CUAAGAUCAUCAGGAGGAA | 7980 | UUCCUCCUGAUGAUCUUAG |
| siRNA 2491 | 2491 | UAAGAUCAUCAGGAGGAAG | 7981 | CUUCCUCCUGAUGAUCUUA |
| siRNA 2492 | 2492 | AAGAUCAUCAGGAGGAAGA | 7982 | UCUUCCUCCUGAUGAUCUU |
| siRNA 2493 | 2493 | AGAUCAUCAGGAGGAAGAA | 7983 | UUCUUCCUCCUGAUGAUCU |
| siRNA 2494 | 2494 | GAUCAUCAGGAGGAAGAAG | 7984 | CUUCUUCCUCCUGAUGAUC |
| siRNA 2495 | 2495 | AUCAUCAGGAGGAAGAAGC | 7985 | GCUUCUUCCUCCUGAUGAU |
| siRNA 2496 | 2496 | UCAUCAGGAGGAAGAAGCA | 7986 | UGCUUCUUCCUCCUGAUGA |
| siRNA 2497 | 2497 | CAUCAGGAGGAAGAAGCAA | 7987 | UUGCUUCUUCCUCCUGAUG |
| siRNA 2498 | 2498 | AUCAGGAGGAAGAAGCAAG | 7988 | CUUGCUUCUUCCUCCUGAU |
| siRNA 2499 | 2499 | UCAGGAGGAAGAAGCAAGC | 7989 | GCUUGCUUCUUCCUCCUGA |
| siRNA 2500 | 2500 | CAGGAGGAAGAAGCAAGCU | 7990 | AGCUUGCUUCUUCCUCCUG |
| siRNA 2501 | 2501 | AGGAGGAAGAAGCAAGCUC | 7991 | GAGCUUGCUUCUUCCUCCU |
| siRNA 2502 | 2502 | GGAGGAAGAAGCAAGCUCA | 7992 | UGAGCUUGCUUCUUCCUCC |
| siRNA 2503 | 2503 | GAGGAAGAAGCAAGCUCAG | 7993 | CUGAGCUUGCUUCUUCCUC |
| siRNA 2504 | 2504 | AGGAAGAAGCAAGCUCAGG | 7994 | CCUGAGCUUGCUUCUUCCU |
| siRNA 2505 | 2505 | GGAAGAAGCAAGCUCAGGC | 7995 | GCCUGAGCUUGCUUCUUCC |
| siRNA 2506 | 2506 | GAAGAAGCAAGCUCAGGCA | 7996 | UGCCUGAGCUUGCUUCUUC |
| siRNA 2507 | 2507 | AAGAAGCAAGCUCAGGCAA | 7997 | UUGCCUGAGCUUGCUUCUU |
| siRNA 2508 | 2508 | AGAAGCAAGCUCAGGCAAA | 7998 | UUUGCCUGAGCUUGCUUCU |
| siRNA 2509 | 2509 | GAAGCAAGCUCAGGCAAAC | 7999 | GUUUGCCUGAGCUUGCUUC |
| siRNA 2510 | 2510 | AAGCAAGCUCAGGCAAACG | 8000 | CGUUUGCCUGAGCUUGCUU |
| siRNA 2511 | 2511 | AGCAAGCUCAGGCAAACGG | 8001 | CCGUUUGCCUGAGCUUGCU |
| siRNA 2512 | 2512 | GCAAGCUCAGGCAAACGGA | 8002 | UCCGUUUGCCUGAGCUUGC |
| siRNA 2513 | 2513 | CAAGCUCAGGCAAACGGAG | 8003 | CUCCGUUUGCCUGAGCUUG |
| siRNA 2514 | 2514 | AAGCUCAGGCAAACGGAGU | 8004 | ACUCCGUUUGCCUGAGCUU |
| siRNA 2515 | 2515 | AGCUCAGGCAAACGGAGUA | 8005 | UACUCCGUUUGCCUGAGCU |
| siRNA 2516 | 2516 | GCUCAGGCAAACGGAGUAA | 8006 | UUACUCCGUUUGCCUGAGC |
| siRNA 2517 | 2517 | CUCAGGCAAACGGAGUAAG | 8007 | CUUACUCCGUUUGCCUGAG |
| siRNA 2518 | 2518 | UCAGGCAAACGGAGUAAGC | 8008 | GCUUACUCCGUUUGCCUGA |
| siRNA 2519 | 2519 | CAGGCAAACGGAGUAAGCC | 8009 | GGCUUACUCCGUUUGCCUG |
| siRNA 2520 | 2520 | AGGCAAACGGAGUAAGCCA | 8010 | UGGCUUACUCCGUUUGCCU |
| siRNA 2521 | 2521 | GGCAAACGGAGUAAGCCAU | 8011 | AUGGCUUACUCCGUUUGCC |
| siRNA 2522 | 2522 | GCAAACGGAGUAAGCCAUA | 8012 | UAUGGCUUACUCCGUUUGC |
| siRNA 2523 | 2523 | CAAACGGAGUAAGCCAUAA | 8013 | UUAUGGCUUACUCCGUUUG |
| siRNA 2524 | 2524 | AAACGGAGUAAGCCAUAAU | 8014 | AUUAUGGCUUACUCCGUUU |
| siRNA 2525 | 2525 | AACGGAGUAAGCCAUAAUA | 8015 | UAUUAUGGCUUACUCCGUU |
| siRNA 2526 | 2526 | ACGGAGUAAGCCAUAAUAU | 8016 | AUAUUAUGGCUUACUCCGU |
| siRNA 2527 | 2527 | CGGAGUAAGCCAUAAUAUU | 8017 | AAUAUUAUGGCUUACUCCG |
| siRNA 2528 | 2528 | GGAGUAAGCCAUAAUAUUA | 8018 | UAAUAUUAUGGCUUACUCC |
| siRNA 2529 | 2529 | GAGUAAGCCAUAAUAUUAC | 8019 | GUAAUAUUAUGGCUUACUC |
| siRNA 2530 | 2530 | AGUAAGCCAUAAUAUUACC | 8020 | GGUAAUAUUAUGGCUUACU |
| siRNA 2531 | 2531 | GUAAGCCAUAAUAUUACCU | 8021 | AGGUAAUAUUAUGGCUUAC |
| siRNA 2532 | 2532 | UAAGCCAUAAUAUUACCUU | 8022 | AAGGUAAUAUUAUGGCUUA |
| siRNA 2533 | 2533 | AAGCCAUAAUAUUACCUUU | 8023 | AAAGGUAAUAUUAUGGCUU |
| siRNA 2534 | 2534 | AGCCAUAAUAUUACCUUUG | 8024 | CAAAGGUAAUAUUAUGGCU |
| siRNA 2535 | 2535 | GCCAUAAUAUUACCUUUGA | 8025 | UCAAAGGUAAUAUUAUGGC |
| siRNA 2536 | 2536 | CCAUAAUAUUACCUUUGAA | 8026 | UUCAAAGGUAAUAUUAUGG |
| siRNA 2537 | 2537 | CAUAAUAUUACCUUUGAAA | 8027 | UUUCAAAGGUAAUAUUAUG |
| siRNA 2538 | 2538 | AUAAUAUUACCUUUGAAAG | 8028 | CUUUCAAAGGUAAUAUUAU |
| siRNA 2539 | 2539 | UAAUAUUACCUUUGAAAGU | 8029 | ACUUUCAAAGGUAAUAUUA |
| siRNA 2540 | 2540 | AAUAUUACCUUUGAAAGUC | 8030 | GACUUUCAAAGGUAAUAUU |
| siRNA 2541 | 2541 | AUAUUACCUUUGAAAGUCC | 8031 | GGACUUUCAAAGGUAAUAU |
| siRNA 2542 | 2542 | UAUUACCUUUGAAAGUCCA | 8032 | UGGACUUUCAAAGGUAAUA |
| siRNA 2543 | 2543 | AUUACCUUUGAAAGUCCAC | 8033 | GUGGACUUUCAAAGGUAAU |
| siRNA 2544 | 2544 | UUACCUUUGAAAGUCCACC | 8034 | GGUGGACUUUCAAAGGUAA |
| siRNA 2545 | 2545 | UACCUUUGAAAGUCCACCU | 8035 | AGGUGGACUUUCAAAGGUA |
| siRNA 2546 | 2546 | ACCUUUGAAAGUCCACCUC | 8036 | GAGGUGGACUUUCAAAGGU |
| siRNA 2547 | 2547 | CCUUUGAAAGUCCACCUCC | 8037 | GGAGGUGGACUUUCAAAGG |
| siRNA 2548 | 2548 | CUUUGAAAGUCCACCUCCA | 8038 | UGGAGGUGGACUUUCAAAG |
| siRNA 2549 | 2549 | UUUGAAAGUCCACCUCCAC | 8039 | GUGGAGGUGGACUUUCAAA |
| siRNA 2550 | 2550 | UUGAAAGUCCACCUCCACC | 8040 | GGUGGAGGUGGACUUUCAA |
| siRNA 2551 | 2551 | UGAAAGUCCACCUCCACCA | 8041 | UGGUGGAGGUGGACUUUCA |
| siRNA 2552 | 2552 | GAAAGUCCACCUCCACCAA | 8042 | UUGGUGGAGGUGGACUUUC |
| siRNA 2553 | 2553 | AAAGUCCACCUCCACCAAU | 8043 | AUUGGUGGAGGUGGACUUU |
| siRNA 2554 | 2554 | AAGUCCACCUCCACCAAUU | 8044 | AAUUGGUGGAGGUGGACUU |
| siRNA 2555 | 2555 | AGUCCACCUCCACCAAUUG | 8045 | CAAUUGGUGGAGGUGGACU |
| siRNA 2556 | 2556 | GUCCACCUCCACCAAUUGA | 8046 | UCAAUUGGUGGAGGUGGAC |
| siRNA 2557 | 2557 | UCCACCUCCACCAAUUGAA | 8047 | UUCAAUUGGUGGAGGUGGA |
| siRNA 2558 | 2558 | CCACCUCCACCAAUUGAAU | 8048 | AUUCAAUUGGUGGAGGUGG |
| siRNA 2559 | 2559 | CACCUCCACCAAUUGAAUG | 8049 | CAUUCAAUUGGUGGAGGUG |
| siRNA 2560 | 2560 | ACCUCCACCAAUUGAAUGG | 8050 | CCAUUCAAUUGGUGGAGGU |
| siRNA 2561 | 2561 | CCUCCACCAAUUGAAUGGC | 8051 | GCCAUUCAAUUGGUGGAGG |
| siRNA 2562 | 2562 | CUCCACCAAUUGAAUGGCA | 8052 | UGCCAUUCAAUUGGUGGAG |
| siRNA 2563 | 2563 | UCCACCAAUUGAAUGGCAU | 8053 | AUGCCAUUCAAUUGGUGGA |
| siRNA 2564 | 2564 | CCACCAAUUGAAUGGCAUA | 8054 | UAUGCCAUUCAAUUGGUGG |
| siRNA 2565 | 2565 | CACCAAUUGAAUGGCAUAU | 8055 | AUAUGCCAUUCAAUUGGUG |
| siRNA 2566 | 2566 | ACCAAUUGAAUGGCAUAUC | 8056 | GAUAUGCCAUUCAAUUGGU |
| siRNA 2567 | 2567 | CCAAUUGAAUGGCAUAUCA | 8057 | UGAUAUGCCAUUCAAUUGG |
| siRNA 2568 | 2568 | CAAUUGAAUGGCAUAUCAG | 8058 | CUGAUAUGCCAUUCAAUUG |
| siRNA 2569 | 2569 | AAUUGAAUGGCAUAUCAGC | 8059 | GCUGAUAUGCCAUUCAAUU |
| siRNA 2570 | 2570 | AUUGAAUGGCAUAUCAGCA | 8060 | UGCUGAUAUGCCAUUCAAU |
| siRNA 2571 | 2571 | UUGAAUGGCAUAUCAGCAA | 8061 | UUGCUGAUAUGCCAUUCAA |
| siRNA 2572 | 2572 | UGAAUGGCAUAUCAGCAAA | 8062 | UUUGCUGAUAUGCCAUUCA |
| siRNA 2573 | 2573 | GAAUGGCAUAUCAGCAAAC | 8063 | GUUUGCUGAUAUGCCAUUC |
| siRNA 2574 | 2574 | AAUGGCAUAUCAGCAAACC | 8064 | GGUUUGCUGAUAUGCCAUU |
| siRNA 2575 | 2575 | AUGGCAUAUCAGCAAACCA | 8065 | UGGUUUGCUGAUAUGCCAU |
| siRNA 2576 | 2576 | UGGCAUAUCAGCAAACCAG | 8066 | CUGGUUUGCUGAUAUGCCA |
| siRNA 2577 | 2577 | GGCAUAUCAGCAAACCAGG | 8067 | CCUGGUUUGCUGAUAUGCC |
| siRNA 2578 | 2578 | GCAUAUCAGCAAACCAGGA | 8068 | UCCUGGUUUGCUGAUAUGC |
| siRNA 2579 | 2579 | CAUAUCAGCAAACCAGGAC | 8069 | GUCCUGGUUUGCUGAUAUG |
| siRNA 2580 | 2580 | AUAUCAGCAAACCAGGACA | 8070 | UGUCCUGGUUUGCUGAUAU |
| siRNA 2581 | 2581 | UAUCAGCAAACCAGGACAG | 8071 | CUGUCCUGGUUUGCUGAUA |
| siRNA 2582 | 2582 | AUCAGCAAACCAGGACAGU | 8072 | ACUGUCCUGGUUUGCUGAU |
| siRNA 2583 | 2583 | UCAGCAAACCAGGACAGUU | 8073 | AACUGUCCUGGUUUGCUGA |
| siRNA 2584 | 2584 | CAGCAAACCAGGACAGUUU | 8074 | AAACUGUCCUGGUUUGCUG |
| siRNA 2585 | 2585 | AGCAAACCAGGACAGUUUG | 8075 | CAAACUGUCCUGGUUUGCU |
| siRNA 2586 | 2586 | GCAAACCAGGACAGUUUGA | 8076 | UCAAACUGUCCUGGUUUGC |
| siRNA 2587 | 2587 | CAAACCAGGACAGUUUGAA | 8077 | UUCAAACUGUCCUGGUUUG |
| siRNA 2588 | 2588 | AAACCAGGACAGUUUGAAA | 8078 | UUUCAAACUGUCCUGGUUU |
| siRNA 2589 | 2589 | AACCAGGACAGUUUGAAAC | 8079 | GUUUCAAACUGUCCUGGUU |
| siRNA 2590 | 2590 | ACCAGGACAGUUUGAAACA | 8080 | UGUUUCAAACUGUCCUGGU |
| siRNA 2591 | 2591 | CCAGGACAGUUUGAAACAU | 8081 | AUGUUUCAAACUGUCCUGG |
| siRNA 2592 | 2592 | CAGGACAGUUUGAAACAUU | 8082 | AAUGUUUCAAACUGUCCUG |
| siRNA 2593 | 2593 | AGGACAGUUUGAAACAUUU | 8083 | AAAUGUUUCAAACUGUCCU |
| siRNA 2594 | 2594 | GGACAGUUUGAAACAUUUG | 8084 | CAAAUGUUUCAAACUGUCC |
| siRNA 2595 | 2595 | GACAGUUUGAAACAUUUGA | 8085 | UCAAAUGUUUCAAACUGUC |
| siRNA 2596 | 2596 | ACAGUUUGAAACAUUUGAU | 8086 | AUCAAAUGUUUCAAACUGU |
| siRNA 2597 | 2597 | CAGUUUGAAACAUUUGAUC | 8087 | GAUCAAAUGUUUCAAACUG |
| siRNA 2598 | 2598 | AGUUUGAAACAUUUGAUCU | 8088 | AGAUCAAAUGUUUCAAACU |
| siRNA 2599 | 2599 | GUUUGAAACAUUUGAUCUC | 8089 | GAGAUCAAAUGUUUCAAAC |
| siRNA 2600 | 2600 | UUUGAAACAUUUGAUCUCA | 8090 | UGAGAUCAAAUGUUUCAAA |
| siRNA 2601 | 2601 | UUGAAACAUUUGAUCUCAU | 8091 | AUGAGAUCAAAUGUUUCAA |
| siRNA 2602 | 2602 | UGAAACAUUUGAUCUCAUG | 8092 | CAUGAGAUCAAAUGUUUCA |
| siRNA 2603 | 2603 | GAAACAUUUGAUCUCAUGA | 8093 | UCAUGAGAUCAAAUGUUUC |
| siRNA 2604 | 2604 | AAACAUUUGAUCUCAUGAC | 8094 | GUCAUGAGAUCAAAUGUUU |
| siRNA 2605 | 2605 | AACAUUUGAUCUCAUGACA | 8095 | UGUCAUGAGAUCAAAUGUU |
| siRNA 2606 | 2606 | ACAUUUGAUCUCAUGACAC | 8096 | GUGUCAUGAGAUCAAAUGU |
| siRNA 2607 | 2607 | CAUUUGAUCUCAUGACACU | 8097 | AGUGUCAUGAGAUCAAAUG |
| siRNA 2608 | 2608 | AUUUGAUCUCAUGACACUU | 8098 | AAGUGUCAUGAGAUCAAAU |
| siRNA 2609 | 2609 | UUUGAUCUCAUGACACUUC | 8099 | GAAGUGUCAUGAGAUCAAA |
| siRNA 2610 | 2610 | UUGAUCUCAUGACACUUCA | 8100 | UGAAGUGUCAUGAGAUCAA |
| siRNA 2611 | 2611 | UGAUCUCAUGACACUUCAU | 8101 | AUGAAGUGUCAUGAGAUCA |
| siRNA 2612 | 2612 | GAUCUCAUGACACUUCAUC | 8102 | GAUGAAGUGUCAUGAGAUC |
| siRNA 2613 | 2613 | AUCUCAUGACACUUCAUCC | 8103 | GGAUGAAGUGUCAUGAGAU |
| siRNA 2614 | 2614 | UCUCAUGACACUUCAUCCA | 8104 | UGGAUGAAGUGUCAUGAGA |
| siRNA 2615 | 2615 | CUCAUGACACUUCAUCCAA | 8105 | UUGGAUGAAGUGUCAUGAG |
| siRNA 2616 | 2616 | UCAUGACACUUCAUCCAAU | 8106 | AUUGGAUGAAGUGUCAUGA |
| siRNA 2617 | 2617 | CAUGACACUUCAUCCAAUA | 8107 | UAUUGGAUGAAGUGUCAUG |
| siRNA 2618 | 2618 | AUGACACUUCAUCCAAUAG | 8108 | CUAUUGGAUGAAGUGUCAU |
| siRNA 2619 | 2619 | UGACACUUCAUCCAAUAGA | 8109 | UCUAUUGGAUGAAGUGUCA |
| siRNA 2620 | 2620 | GACACUUCAUCCAAUAGAA | 8110 | UUCUAUUGGAUGAAGUGUC |
| siRNA 2621 | 2621 | ACACUUCAUCCAAUAGAAA | 8111 | UUUCUAUUGGAUGAAGUGU |
| siRNA 2622 | 2622 | CACUUCAUCCAAUAGAAAU | 8112 | AUUUCUAUUGGAUGAAGUG |
| siRNA 2623 | 2623 | ACUUCAUCCAAUAGAAAUU | 8113 | AAUUUCUAUUGGAUGAAGU |
| siRNA 2624 | 2624 | CUUCAUCCAAUAGAAAUUG | 8114 | CAAUUUCUAUUGGAUGAAG |
| siRNA 2625 | 2625 | UUCAUCCAAUAGAAAUUGC | 8115 | GCAAUUUCUAUUGGAUGAA |
| siRNA 2626 | 2626 | UCAUCCAAUAGAAAUUGCA | 8116 | UGCAAUUUCUAUUGGAUGA |
| siRNA 2627 | 2627 | CAUCCAAUAGAAAUUGCAC | 8117 | GUGCAAUUUCUAUUGGAUG |
| siRNA 2628 | 2628 | AUCCAAUAGAAAUUGCACG | 8118 | CGUGCAAUUUCUAUUGGAU |
| siRNA 2629 | 2629 | UCCAAUAGAAAUUGCACGU | 8119 | ACGUGCAAUUUCUAUUGGA |
| siRNA 2630 | 2630 | CCAAUAGAAAUUGCACGUC | 8120 | GACGUGCAAUUUCUAUUGG |
| siRNA 2631 | 2631 | CAAUAGAAAUUGCACGUCA | 8121 | UGACGUGCAAUUUCUAUUG |
| siRNA 2632 | 2632 | AAUAGAAAUUGCACGUCAG | 8122 | CUGACGUGCAAUUUCUAUU |
| siRNA 2633 | 2633 | AUAGAAAUUGCACGUCAGC | 8123 | GCUGACGUGCAAUUUCUAU |
| siRNA 2634 | 2634 | UAGAAAUUGCACGUCAGCU | 8124 | AGCUGACGUGCAAUUUCUA |
| siRNA 2635 | 2635 | AGAAAUUGCACGUCAGCUG | 8125 | CAGCUGACGUGCAAUUUCU |
| siRNA 2636 | 2636 | GAAAUUGCACGUCAGCUGA | 8126 | UCAGCUGACGUGCAAUUUC |
| siRNA 2637 | 2637 | AAAUUGCACGUCAGCUGAC | 8127 | GUCAGCUGACGUGCAAUUU |
| siRNA 2638 | 2638 | AAUUGCACGUCAGCUGACA | 8128 | UGUCAGCUGACGUGCAAUU |
| siRNA 2639 | 2639 | AUUGCACGUCAGCUGACAC | 8129 | GUGUCAGCUGACGUGCAAU |
| siRNA 2640 | 2640 | UUGCACGUCAGCUGACACU | 8130 | AGUGUCAGCUGACGUGCAA |
| siRNA 2641 | 2641 | UGCACGUCAGCUGACACUU | 8131 | AAGUGUCAGCUGACGUGCA |
| siRNA 2642 | 2642 | GCACGUCAGCUGACACUUU | 8132 | AAAGUGUCAGCUGACGUGC |
| siRNA 2643 | 2643 | CACGUCAGCUGACACUUUU | 8133 | AAAAGUGUCAGCUGACGUG |
| siRNA 2644 | 2644 | ACGUCAGCUGACACUUUUG | 8134 | CAAAAGUGUCAGCUGACGU |
| siRNA 2645 | 2645 | CGUCAGCUGACACUUUUGG | 8135 | CCAAAAGUGUCAGCUGACG |
| siRNA 2646 | 2646 | GUCAGCUGACACUUUUGGA | 8136 | UCCAAAAGUGUCAGCUGAC |
| siRNA 2647 | 2647 | UCAGCUGACACUUUUGGAG | 8137 | CUCCAAAAGUGUCAGCUGA |
| siRNA 2648 | 2648 | CAGCUGACACUUUUGGAGU | 8138 | ACUCCAAAAGUGUCAGCUG |
| siRNA 2649 | 2649 | AGCUGACACUUUUGGAGUC | 8139 | GACUCCAAAAGUGUCAGCU |
| siRNA 2650 | 2650 | GCUGACACUUUUGGAGUCU | 8140 | AGACUCCAAAAGUGUCAGC |
| siRNA 2651 | 2651 | CUGACACUUUUGGAGUCUG | 8141 | CAGACUCCAAAAGUGUCAG |
| siRNA 2652 | 2652 | UGACACUUUUGGAGUCUGA | 8142 | UCAGACUCCAAAAGUGUCA |
| siRNA 2653 | 2653 | GACACUUUUGGAGUCUGAU | 8143 | AUCAGACUCCAAAAGUGUC |
| siRNA 2654 | 2654 | ACACUUUUGGAGUCUGAUC | 8144 | GAUCAGACUCCAAAAGUGU |
| siRNA 2655 | 2655 | CACUUUUGGAGUCUGAUCU | 8145 | AGAUCAGACUCCAAAAGUG |
| siRNA 2656 | 2656 | ACUUUUGGAGUCUGAUCUU | 8146 | AAGAUCAGACUCCAAAAGU |
| siRNA 2657 | 2657 | CUUUUGGAGUCUGAUCUUU | 8147 | AAAGAUCAGACUCCAAAAG |
| siRNA 2658 | 2658 | UUUUGGAGUCUGAUCUUUA | 8148 | UAAAGAUCAGACUCCAAAA |
| siRNA 2659 | 2659 | UUUGGAGUCUGAUCUUUAC | 8149 | GUAAAGAUCAGACUCCAAA |
| siRNA 2660 | 2660 | UUGGAGUCUGAUCUUUACA | 8150 | UGUAAAGAUCAGACUCCAA |
| siRNA 2661 | 2661 | UGGAGUCUGAUCUUUACAG | 8151 | CUGUAAAGAUCAGACUCCA |
| siRNA 2662 | 2662 | GGAGUCUGAUCUUUACAGG | 8152 | CCUGUAAAGAUCAGACUCC |
| siRNA 2663 | 2663 | GAGUCUGAUCUUUACAGGA | 8153 | UCCUGUAAAGAUCAGACUC |
| siRNA 2664 | 2664 | AGUCUGAUCUUUACAGGAA | 8154 | UUCCUGUAAAGAUCAGACU |
| siRNA 2665 | 2665 | GUCUGAUCUUUACAGGAAA | 8155 | UUUCCUGUAAAGAUCAGAC |
| siRNA 2666 | 2666 | UCUGAUCUUUACAGGAAAG | 8156 | CUUUCCUGUAAAGAUCAGA |
| siRNA 2667 | 2667 | CUGAUCUUUACAGGAAAGU | 8157 | ACUUUCCUGUAAAGAUCAG |
| siRNA 2668 | 2668 | UGAUCUUUACAGGAAAGUU | 8158 | AACUUUCCUGUAAAGAUCA |
| siRNA 2669 | 2669 | GAUCUUUACAGGAAAGUUC | 8159 | GAACUUUCCUGUAAAGAUC |
| siRNA 2670 | 2670 | AUCUUUACAGGAAAGUUCA | 8160 | UGAACUUUCCUGUAAAGAU |
| siRNA 2671 | 2671 | UCUUUACAGGAAAGUUCAA | 8161 | UUGAACUUUCCUGUAAAGA |
| siRNA 2672 | 2672 | CUUUACAGGAAAGUUCAAC | 8162 | GUUGAACUUUCCUGUAAAG |
| siRNA 2673 | 2673 | UUUACAGGAAAGUUCAACC | 8163 | GGUUGAACUUUCCUGUAAA |
| siRNA 2674 | 2674 | UUACAGGAAAGUUCAACCG | 8164 | CGGUUGAACUUUCCUGUAA |
| siRNA 2675 | 2675 | UACAGGAAAGUUCAACCGU | 8165 | ACGGUUGAACUUUCCUGUA |
| siRNA 2676 | 2676 | ACAGGAAAGUUCAACCGUC | 8166 | GACGGUUGAACUUUCCUGU |
| siRNA 2677 | 2677 | CAGGAAAGUUCAACCGUCU | 8167 | AGACGGUUGAACUUUCCUG |
| siRNA 2678 | 2678 | AGGAAAGUUCAACCGUCUG | 8168 | CAGACGGUUGAACUUUCCU |
| siRNA 2679 | 2679 | GGAAAGUUCAACCGUCUGA | 8169 | UCAGACGGUUGAACUUUCC |
| siRNA 2680 | 2680 | GAAAGUUCAACCGUCUGAA | 8170 | UUCAGACGGUUGAACUUUC |
| siRNA 2681 | 2681 | AAAGUUCAACCGUCUGAAC | 8171 | GUUCAGACGGUUGAACUUU |
| siRNA 2682 | 2682 | AAGUUCAACCGUCUGAACU | 8172 | AGUUCAGACGGUUGAACUU |
| siRNA 2683 | 2683 | AGUUCAACCGUCUGAACUU | 8173 | AAGUUCAGACGGUUGAACU |
| siRNA 2684 | 2684 | GUUCAACCGUCUGAACUUG | 8174 | CAAGUUCAGACGGUUGAAC |
| siRNA 2685 | 2685 | UUCAACCGUCUGAACUUGU | 8175 | ACAAGUUCAGACGGUUGAA |
| siRNA 2686 | 2686 | UCAACCGUCUGAACUUGUA | 8176 | UACAAGUUCAGACGGUUGA |
| siRNA 2687 | 2687 | CAACCGUCUGAACUUGUAG | 8177 | CUACAAGUUCAGACGGUUG |
| siRNA 2688 | 2688 | AACCGUCUGAACUUGUAGG | 8178 | CCUACAAGUUCAGACGGUU |
| siRNA 2689 | 2689 | ACCGUCUGAACUUGUAGGG | 8179 | CCCUACAAGUUCAGACGGU |
| siRNA 2690 | 2690 | CCGUCUGAACUUGUAGGGA | 8180 | UCCCUACAAGUUCAGACGG |
| siRNA 2691 | 2691 | CGUCUGAACUUGUAGGGAG | 8181 | CUCCCUACAAGUUCAGACG |
| siRNA 2692 | 2692 | GUCUGAACUUGUAGGGAGU | 8182 | ACUCCCUACAAGUUCAGAC |
| siRNA 2693 | 2693 | UCUGAACUUGUAGGGAGUG | 8183 | CACUCCCUACAAGUUCAGA |
| siRNA 2694 | 2694 | CUGAACUUGUAGGGAGUGU | 8184 | ACACUCCCUACAAGUUCAG |
| siRNA 2695 | 2695 | UGAACUUGUAGGGAGUGUG | 8185 | CACACUCCCUACAAGUUCA |
| siRNA 2696 | 2696 | GAACUUGUAGGGAGUGUGU | 8186 | ACACACUCCCUACAAGUUC |
| siRNA 2697 | 2697 | AACUUGUAGGGAGUGUGUG | 8187 | CACACACUCCCUACAAGUU |
| siRNA 2698 | 2698 | ACUUGUAGGGAGUGUGUGG | 8188 | CCACACACUCCCUACAAGU |
| siRNA 2699 | 2699 | CUUGUAGGGAGUGUGUGGA | 8189 | UCCACACACUCCCUACAAG |
| siRNA 2700 | 2700 | UUGUAGGGAGUGUGUGGAC | 8190 | GUCCACACACUCCCUACAA |
| siRNA 2701 | 2701 | UGUAGGGAGUGUGUGGACC | 8191 | GGUCCACACACUCCCUACA |
| siRNA 2702 | 2702 | GUAGGGAGUGUGUGGACCA | 8192 | UGGUCCACACACUCCCUAC |
| siRNA 2703 | 2703 | UAGGGAGUGUGUGGACCAA | 8193 | UUGGUCCACACACUCCCUA |
| siRNA 2704 | 2704 | AGGGAGUGUGUGGACCAAA | 8194 | UUUGGUCCACACACUCCCU |
| siRNA 2705 | 2705 | GGGAGUGUGUGGACCAAAG | 8195 | CUUUGGUCCACACACUCCC |
| siRNA 2706 | 2706 | GGAGUGUGUGGACCAAAGA | 8196 | UCUUUGGUCCACACACUCC |
| siRNA 2707 | 2707 | GAGUGUGUGGACCAAAGAA | 8197 | UUCUUUGGUCCACACACUC |
| siRNA 2708 | 2708 | AGUGUGUGGACCAAAGAAG | 8198 | CUUCUUUGGUCCACACACU |
| siRNA 2709 | 2709 | GUGUGUGGACCAAAGAAGA | 8199 | UCUUCUUUGGUCCACACAC |
| siRNA 2710 | 2710 | UGUGUGGACCAAAGAAGAU | 8200 | AUCUUCUUUGGUCCACACA |
| siRNA 2711 | 2711 | GUGUGGACCAAAGAAGAUA | 8201 | UAUCUUCUUUGGUCCACAC |
| siRNA 2712 | 2712 | UGUGGACCAAAGAAGAUAA | 8202 | UUAUCUUCUUUGGUCCACA |
| siRNA 2713 | 2713 | GUGGACCAAAGAAGAUAAA | 8203 | UUUAUCUUCUUUGGUCCAC |
| siRNA 2714 | 2714 | UGGACCAAAGAAGAUAAAG | 8204 | CUUUAUCUUCUUUGGUCCA |
| siRNA 2715 | 2715 | GGACCAAAGAAGAUAAAGA | 8205 | UCUUUAUCUUCUUUGGUCC |
| siRNA 2716 | 2716 | GACCAAAGAAGAUAAAGAA | 8206 | UUCUUUAUCUUCUUUGGUC |
| siRNA 2717 | 2717 | ACCAAAGAAGAUAAAGAAA | 8207 | UUUCUUUAUCUUCUUUGGU |
| siRNA 2718 | 2718 | CCAAAGAAGAUAAAGAAAU | 8208 | AUUUCUUUAUCUUCUUUGG |
| siRNA 2719 | 2719 | CAAAGAAGAUAAAGAAAUA | 8209 | UAUUUCUUUAUCUUCUUUG |
| siRNA 2720 | 2720 | AAAGAAGAUAAAGAAAUAA | 8210 | UUAUUUCUUUAUCUUCUUU |
| siRNA 2721 | 2721 | AAGAAGAUAAAGAAAUAAA | 8211 | UUUAUUUCUUUAUCUUCUU |
| siRNA 2722 | 2722 | AGAAGAUAAAGAAAUAAAU | 8212 | AUUUAUUUCUUUAUCUUCU |
| siRNA 2723 | 2723 | GAAGAUAAAGAAAUAAAUU | 8213 | AAUUUAUUUCUUUAUCUUC |
| siRNA 2724 | 2724 | AAGAUAAAGAAAUAAAUUC | 8214 | GAAUUUAUUUCUUUAUCUU |
| siRNA 2725 | 2725 | AGAUAAAGAAAUAAAUUCU | 8215 | AGAAUUUAUUUCUUUAUCU |
| siRNA 2726 | 2726 | GAUAAAGAAAUAAAUUCUC | 8216 | GAGAAUUUAUUUCUUUAUC |
| siRNA 2727 | 2727 | AUAAAGAAAUAAAUUCUCC | 8217 | GGAGAAUUUAUUUCUUUAU |
| siRNA 2728 | 2728 | UAAAGAAAUAAAUUCUCCA | 8218 | UGGAGAAUUUAUUUCUUUA |
| siRNA 2729 | 2729 | AAAGAAAUAAAUUCUCCAA | 8219 | UUGGAGAAUUUAUUUCUUU |
| siRNA 2730 | 2730 | AAGAAAUAAAUUCUCCAAA | 8220 | UUUGGAGAAUUUAUUUCUU |
| siRNA 2731 | 2731 | AGAAAUAAAUUCUCCAAAU | 8221 | AUUUGGAGAAUUUAUUUCU |
| siRNA 2732 | 2732 | GAAAUAAAUUCUCCAAAUU | 8222 | AAUUUGGAGAAUUUAUUUC |
| siRNA 2733 | 2733 | AAAUAAAUUCUCCAAAUUU | 8223 | AAAUUUGGAGAAUUUAUUU |
| siRNA 2734 | 2734 | AAUAAAUUCUCCAAAUUUA | 8224 | UAAAUUUGGAGAAUUUAUU |
| siRNA 2735 | 2735 | AUAAAUUCUCCAAAUUUAU | 8225 | AUAAAUUUGGAGAAUUUAU |
| siRNA 2736 | 2736 | UAAAUUCUCCAAAUUUAUU | 8226 | AAUAAAUUUGGAGAAUUUA |
| siRNA 2737 | 2737 | AAAUUCUCCAAAUUUAUUA | 8227 | UAAUAAAUUUGGAGAAUUU |
| siRNA 2738 | 2738 | AAUUCUCCAAAUUUAUUAA | 8228 | UUAAUAAAUUUGGAGAAUU |
| siRNA 2739 | 2739 | AUUCUCCAAAUUUAUUAAA | 8229 | UUUAAUAAAUUUGGAGAAU |
| siRNA 2740 | 2740 | UUCUCCAAAUUUAUUAAAA | 8230 | UUUUAAUAAAUUUGGAGAA |
| siRNA 2741 | 2741 | UCUCCAAAUUUAUUAAAAA | 8231 | UUUUUAAUAAAUUUGGAGA |
| siRNA 2742 | 2742 | CUCCAAAUUUAUUAAAAAU | 8232 | AUUUUUAAUAAAUUUGGAG |
| siRNA 2743 | 2743 | UCCAAAUUUAUUAAAAAUG | 8233 | CAUUUUUAAUAAAUUUGGA |
| siRNA 2744 | 2744 | CCAAAUUUAUUAAAAAUGA | 8234 | UCAUUUUUAAUAAAUUUGG |
| siRNA 2745 | 2745 | CAAAUUUAUUAAAAAUGAU | 8235 | AUCAUUUUUAAUAAAUUUG |
| siRNA 2746 | 2746 | AAAUUUAUUAAAAAUGAUU | 8236 | AAUCAUUUUUAAUAAAUUU |
| siRNA 2747 | 2747 | AAUUUAUUAAAAAUGAUUC | 8237 | GAAUCAUUUUUAAUAAAUU |
| siRNA 2748 | 2748 | AUUUAUUAAAAAUGAUUCG | 8238 | CGAAUCAUUUUUAAUAAAU |
| siRNA 2749 | 2749 | UUUAUUAAAAAUGAUUCGC | 8239 | GCGAAUCAUUUUUAAUAAA |
| siRNA 2750 | 2750 | UUAUUAAAAAUGAUUCGCC | 8240 | GGCGAAUCAUUUUUAAUAA |
| siRNA 2751 | 2751 | UAUUAAAAAUGAUUCGCCA | 8241 | UGGCGAAUCAUUUUUAAUA |
| siRNA 2752 | 2752 | AUUAAAAAUGAUUCGCCAU | 8242 | AUGGCGAAUCAUUUUUAAU |
| siRNA 2753 | 2753 | UUAAAAAUGAUUCGCCAUA | 8243 | UAUGGCGAAUCAUUUUUAA |
| siRNA 2754 | 2754 | UAAAAAUGAUUCGCCAUAC | 8244 | GUAUGGCGAAUCAUUUUUA |
| siRNA 2755 | 2755 | AAAAAUGAUUCGCCAUACC | 8245 | GGUAUGGCGAAUCAUUUUU |
| siRNA 2756 | 2756 | AAAAUGAUUCGCCAUACCA | 8246 | UGGUAUGGCGAAUCAUUUU |
| siRNA 2757 | 2757 | AAAUGAUUCGCCAUACCAC | 8247 | GUGGUAUGGCGAAUCAUUU |
| siRNA 2758 | 2758 | AAUGAUUCGCCAUACCACA | 8248 | UGUGGUAUGGCGAAUCAUU |
| siRNA 2759 | 2759 | AUGAUUCGCCAUACCACAA | 8249 | UUGUGGUAUGGCGAAUCAU |
| siRNA 2760 | 2760 | UGAUUCGCCAUACCACAAA | 8250 | UUUGUGGUAUGGCGAAUCA |
| siRNA 2761 | 2761 | GAUUCGCCAUACCACAAAU | 8251 | AUUUGUGGUAUGGCGAAUC |
| siRNA 2762 | 2762 | AUUCGCCAUACCACAAAUC | 8252 | GAUUUGUGGUAUGGCGAAU |
| siRNA 2763 | 2763 | UUCGCCAUACCACAAAUCU | 8253 | AGAUUUGUGGUAUGGCGAA |
| siRNA 2764 | 2764 | UCGCCAUACCACAAAUCUC | 8254 | GAGAUUUGUGGUAUGGCGA |
| siRNA 2765 | 2765 | CGCCAUACCACAAAUCUCA | 8255 | UGAGAUUUGUGGUAUGGCG |
| siRNA 2766 | 2766 | GCCAUACCACAAAUCUCAC | 8256 | GUGAGAUUUGUGGUAUGGC |
| siRNA 2767 | 2767 | CCAUACCACAAAUCUCACC | 8257 | GGUGAGAUUUGUGGUAUGG |
| siRNA 2768 | 2768 | CAUACCACAAAUCUCACCC | 8258 | GGGUGAGAUUUGUGGUAUG |
| siRNA 2769 | 2769 | AUACCACAAAUCUCACCCU | 8259 | AGGGUGAGAUUUGUGGUAU |
| siRNA 2770 | 2770 | UACCACAAAUCUCACCCUC | 8260 | GAGGGUGAGAUUUGUGGUA |
| siRNA 2771 | 2771 | ACCACAAAUCUCACCCUCU | 8261 | AGAGGGUGAGAUUUGUGGU |
| siRNA 2772 | 2772 | CCACAAAUCUCACCCUCUG | 8262 | CAGAGGGUGAGAUUUGUGG |
| siRNA 2773 | 2773 | CACAAAUCUCACCCUCUGG | 8263 | CCAGAGGGUGAGAUUUGUG |
| siRNA 2774 | 2774 | ACAAAUCUCACCCUCUGGU | 8264 | ACCAGAGGGUGAGAUUUGU |
| siRNA 2775 | 2775 | CAAAUCUCACCCUCUGGUU | 8265 | AACCAGAGGGUGAGAUUUG |
| siRNA 2776 | 2776 | AAAUCUCACCCUCUGGUUU | 8266 | AAACCAGAGGGUGAGAUUU |
| siRNA 2777 | 2777 | AAUCUCACCCUCUGGUUUG | 8267 | CAAACCAGAGGGUGAGAUU |
| siRNA 2778 | 2778 | AUCUCACCCUCUGGUUUGA | 8268 | UCAAACCAGAGGGUGAGAU |
| siRNA 2779 | 2779 | UCUCACCCUCUGGUUUGAA | 8269 | UUCAAACCAGAGGGUGAGA |
| siRNA 2780 | 2780 | CUCACCCUCUGGUUUGAAA | 8270 | UUUCAAACCAGAGGGUGAG |
| siRNA 2781 | 2781 | UCACCCUCUGGUUUGAAAA | 8271 | UUUUCAAACCAGAGGGUGA |
| siRNA 2782 | 2782 | CACCCUCUGGUUUGAAAAA | 8272 | UUUUUCAAACCAGAGGGUG |
| siRNA 2783 | 2783 | ACCCUCUGGUUUGAAAAAU | 8273 | AUUUUUCAAACCAGAGGGU |
| siRNA 2784 | 2784 | CCCUCUGGUUUGAAAAAUG | 8274 | CAUUUUUCAAACCAGAGGG |
| siRNA 2785 | 2785 | CCUCUGGUUUGAAAAAUGC | 8275 | GCAUUUUUCAAACCAGAGG |
| siRNA 2786 | 2786 | CUCUGGUUUGAAAAAUGCA | 8276 | UGCAUUUUUCAAACCAGAG |
| siRNA 2787 | 2787 | UCUGGUUUGAAAAAUGCAU | 8277 | AUGCAUUUUUCAAACCAGA |
| siRNA 2788 | 2788 | CUGGUUUGAAAAAUGCAUU | 8278 | AAUGCAUUUUUCAAACCAG |
| siRNA 2789 | 2789 | UGGUUUGAAAAAUGCAUUG | 8279 | CAAUGCAUUUUUCAAACCA |
| siRNA 2790 | 2790 | GGUUUGAAAAAUGCAUUGU | 8280 | ACAAUGCAUUUUUCAAACC |
| siRNA 2791 | 2791 | GUUUGAAAAAUGCAUUGUG | 8281 | CACAAUGCAUUUUUCAAAC |
| siRNA 2792 | 2792 | UUUGAAAAAUGCAUUGUGG | 8282 | CCACAAUGCAUUUUUCAAA |
| siRNA 2793 | 2793 | UUGAAAAAUGCAUUGUGGA | 8283 | UCCACAAUGCAUUUUUCAA |
| siRNA 2794 | 2794 | UGAAAAAUGCAUUGUGGAA | 8284 | UUCCACAAUGCAUUUUUCA |
| siRNA 2795 | 2795 | GAAAAAUGCAUUGUGGAAG | 8285 | CUUCCACAAUGCAUUUUUC |
| siRNA 2796 | 2796 | AAAAAUGCAUUGUGGAAGC | 8286 | GCUUCCACAAUGCAUUUUU |
| siRNA 2797 | 2797 | AAAAUGCAUUGUGGAAGCA | 8287 | UGCUUCCACAAUGCAUUUU |
| siRNA 2798 | 2798 | AAAUGCAUUGUGGAAGCAG | 8288 | CUGCUUCCACAAUGCAUUU |
| siRNA 2799 | 2799 | AAUGCAUUGUGGAAGCAGA | 8289 | UCUGCUUCCACAAUGCAUU |
| siRNA 2800 | 2800 | AUGCAUUGUGGAAGCAGAA | 8290 | UUCUGCUUCCACAAUGCAU |
| siRNA 2801 | 2801 | UGCAUUGUGGAAGCAGAAA | 8291 | UUUCUGCUUCCACAAUGCA |
| siRNA 2802 | 2802 | GCAUUGUGGAAGCAGAAAA | 8292 | UUUUCUGCUUCCACAAUGC |
| siRNA 2803 | 2803 | CAUUGUGGAAGCAGAAAAU | 8293 | AUUUUCUGCUUCCACAAUG |
| siRNA 2804 | 2804 | AUUGUGGAAGCAGAAAAUU | 8294 | AAUUUUCUGCUUCCACAAU |
| siRNA 2805 | 2805 | UUGUGGAAGCAGAAAAUUU | 8295 | AAAUUUUCUGCUUCCACAA |
| siRNA 2806 | 2806 | UGUGGAAGCAGAAAAUUUU | 8296 | AAAAUUUUCUGCUUCCACA |
| siRNA 2807 | 2807 | GUGGAAGCAGAAAAUUUUG | 8297 | CAAAAUUUUCUGCUUCCAC |
| siRNA 2808 | 2808 | UGGAAGCAGAAAAUUUUGA | 8298 | UCAAAAUUUUCUGCUUCCA |
| siRNA 2809 | 2809 | GGAAGCAGAAAAUUUUGAA | 8299 | UUCAAAAUUUUCUGCUUCC |
| siRNA 2810 | 2810 | GAAGCAGAAAAUUUUGAAG | 8300 | CUUCAAAAUUUUCUGCUUC |
| siRNA 2811 | 2811 | AAGCAGAAAAUUUUGAAGA | 8301 | UCUUCAAAAUUUUCUGCUU |
| siRNA 2812 | 2812 | AGCAGAAAAUUUUGAAGAA | 8302 | UUCUUCAAAAUUUUCUGCU |
| siRNA 2813 | 2813 | GCAGAAAAUUUUGAAGAAC | 8303 | GUUCUUCAAAAUUUUCUGC |
| siRNA 2814 | 2814 | CAGAAAAUUUUGAAGAACG | 8304 | CGUUCUUCAAAAUUUUCUG |
| siRNA 2815 | 2815 | AGAAAAUUUUGAAGAACGG | 8305 | CCGUUCUUCAAAAUUUUCU |
| siRNA 2816 | 2816 | GAAAAUUUUGAAGAACGGG | 8306 | CCCGUUCUUCAAAAUUUUC |
| siRNA 2817 | 2817 | AAAAUUUUGAAGAACGGGU | 8307 | ACCCGUUCUUCAAAAUUUU |
| siRNA 2818 | 2818 | AAAUUUUGAAGAACGGGUG | 8308 | CACCCGUUCUUCAAAAUUU |
| siRNA 2819 | 2819 | AAUUUUGAAGAACGGGUGG | 8309 | CCACCCGUUCUUCAAAAUU |
| siRNA 2820 | 2820 | AUUUUGAAGAACGGGUGGC | 8310 | GCCACCCGUUCUUCAAAAU |
| siRNA 2821 | 2821 | UUUUGAAGAACGGGUGGCA | 8311 | UGCCACCCGUUCUUCAAAA |
| siRNA 2822 | 2822 | UUUGAAGAACGGGUGGCAG | 8312 | CUGCCACCCGUUCUUCAAA |
| siRNA 2823 | 2823 | UUGAAGAACGGGUGGCAGU | 8313 | ACUGCCACCCGUUCUUCAA |
| siRNA 2824 | 2824 | UGAAGAACGGGUGGCAGUA | 8314 | UACUGCCACCCGUUCUUCA |
| siRNA 2825 | 2825 | GAAGAACGGGUGGCAGUAC | 8315 | GUACUGCCACCCGUUCUUC |
| siRNA 2826 | 2826 | AAGAACGGGUGGCAGUACU | 8316 | AGUACUGCCACCCGUUCUU |
| siRNA 2827 | 2827 | AGAACGGGUGGCAGUACUA | 8317 | UAGUACUGCCACCCGUUCU |
| siRNA 2828 | 2828 | GAACGGGUGGCAGUACUAA | 8318 | UUAGUACUGCCACCCGUUC |
| siRNA 2829 | 2829 | AACGGGUGGCAGUACUAAG | 8319 | CUUAGUACUGCCACCCGUU |
| siRNA 2830 | 2830 | ACGGGUGGCAGUACUAAGU | 8320 | ACUUAGUACUGCCACCCGU |
| siRNA 2831 | 2831 | CGGGUGGCAGUACUAAGUA | 8321 | UACUUAGUACUGCCACCCG |
| siRNA 2832 | 2832 | GGGUGGCAGUACUAAGUAG | 8322 | CUACUUAGUACUGCCACCC |
| siRNA 2833 | 2833 | GGUGGCAGUACUAAGUAGA | 8323 | UCUACUUAGUACUGCCACC |
| siRNA 2834 | 2834 | GUGGCAGUACUAAGUAGAA | 8324 | UUCUACUUAGUACUGCCAC |
| siRNA 2835 | 2835 | UGGCAGUACUAAGUAGAAU | 8325 | AUUCUACUUAGUACUGCCA |
| siRNA 2836 | 2836 | GGCAGUACUAAGUAGAAUU | 8326 | AAUUCUACUUAGUACUGCC |
| siRNA 2837 | 2837 | GCAGUACUAAGUAGAAUUA | 8327 | UAAUUCUACUUAGUACUGC |
| siRNA 2838 | 2838 | CAGUACUAAGUAGAAUUAU | 8328 | AUAAUUCUACUUAGUACUG |
| siRNA 2839 | 2839 | AGUACUAAGUAGAAUUAUA | 8329 | UAUAAUUCUACUUAGUACU |
| siRNA 2840 | 2840 | GUACUAAGUAGAAUUAUAG | 8330 | CUAUAAUUCUACUUAGUAC |
| siRNA 2841 | 2841 | UACUAAGUAGAAUUAUAGA | 8331 | UCUAUAAUUCUACUUAGUA |
| siRNA 2842 | 2842 | ACUAAGUAGAAUUAUAGAA | 8332 | UUCUAUAAUUCUACUUAGU |
| siRNA 2843 | 2843 | CUAAGUAGAAUUAUAGAAA | 8333 | UUUCUAUAAUUCUACUUAG |
| siRNA 2844 | 2844 | UAAGUAGAAUUAUAGAAAU | 8334 | AUUUCUAUAAUUCUACUUA |
| siRNA 2845 | 2845 | AAGUAGAAUUAUAGAAAUU | 8335 | AAUUUCUAUAAUUCUACUU |
| siRNA 2846 | 2846 | AGUAGAAUUAUAGAAAUUC | 8336 | GAAUUUCUAUAAUUCUACU |
| siRNA 2847 | 2847 | GUAGAAUUAUAGAAAUUCU | 8337 | AGAAUUUCUAUAAUUCUAC |
| siRNA 2848 | 2848 | UAGAAUUAUAGAAAUUCUG | 8338 | CAGAAUUUCUAUAAUUCUA |
| siRNA 2849 | 2849 | AGAAUUAUAGAAAUUCUGC | 8339 | GCAGAAUUUCUAUAAUUCU |
| siRNA 2850 | 2850 | GAAUUAUAGAAAUUCUGCA | 8340 | UGCAGAAUUUCUAUAAUUC |
| siRNA 2851 | 2851 | AAUUAUAGAAAUUCUGCAA | 8341 | UUGCAGAAUUUCUAUAAUU |
| siRNA 2852 | 2852 | AUUAUAGAAAUUCUGCAAG | 8342 | CUUGCAGAAUUUCUAUAAU |
| siRNA 2853 | 2853 | UUAUAGAAAUUCUGCAAGU | 8343 | ACUUGCAGAAUUUCUAUAA |
| siRNA 2854 | 2854 | UAUAGAAAUUCUGCAAGUU | 8344 | AACUUGCAGAAUUUCUAUA |
| siRNA 2855 | 2855 | AUAGAAAUUCUGCAAGUUU | 8345 | AAACUUGCAGAAUUUCUAU |
| siRNA 2856 | 2856 | UAGAAAUUCUGCAAGUUUU | 8346 | AAAACUUGCAGAAUUUCUA |
| siRNA 2857 | 2857 | AGAAAUUCUGCAAGUUUUU | 8347 | AAAAACUUGCAGAAUUUCU |
| siRNA 2858 | 2858 | GAAAUUCUGCAAGUUUUUC | 8348 | GAAAAACUUGCAGAAUUUC |
| siRNA 2859 | 2859 | AAAUUCUGCAAGUUUUUCA | 8349 | UGAAAAACUUGCAGAAUUU |
| siRNA 2860 | 2860 | AAUUCUGCAAGUUUUUCAA | 8350 | UUGAAAAACUUGCAGAAUU |
| siRNA 2861 | 2861 | AUUCUGCAAGUUUUUCAAG | 8351 | CUUGAAAAACUUGCAGAAU |
| siRNA 2862 | 2862 | UUCUGCAAGUUUUUCAAGA | 8352 | UCUUGAAAAACUUGCAGAA |
| siRNA 2863 | 2863 | UCUGCAAGUUUUUCAAGAU | 8353 | AUCUUGAAAAACUUGCAGA |
| siRNA 2864 | 2864 | CUGCAAGUUUUUCAAGAUU | 8354 | AAUCUUGAAAAACUUGCAG |
| siRNA 2865 | 2865 | UGCAAGUUUUUCAAGAUUU | 8355 | AAAUCUUGAAAAACUUGCA |
| siRNA 2866 | 2866 | GCAAGUUUUUCAAGAUUUG | 8356 | CAAAUCUUGAAAAACUUGC |
| siRNA 2867 | 2867 | CAAGUUUUUCAAGAUUUGA | 8357 | UCAAAUCUUGAAAAACUUG |
| siRNA 2868 | 2868 | AAGUUUUUCAAGAUUUGAA | 8358 | UUCAAAUCUUGAAAAACUU |
| siRNA 2869 | 2869 | AGUUUUUCAAGAUUUGAAU | 8359 | AUUCAAAUCUUGAAAAACU |
| siRNA 2870 | 2870 | GUUUUUCAAGAUUUGAAUA | 8360 | UAUUCAAAUCUUGAAAAAC |
| siRNA 2871 | 2871 | UUUUUCAAGAUUUGAAUAA | 8361 | UUAUUCAAAUCUUGAAAAA |
| siRNA 2872 | 2872 | UUUUCAAGAUUUGAAUAAU | 8362 | AUUAUUCAAAUCUUGAAAA |
| siRNA 2873 | 2873 | UUUCAAGAUUUGAAUAAUU | 8363 | AAUUAUUCAAAUCUUGAAA |
| siRNA 2874 | 2874 | UUCAAGAUUUGAAUAAUUU | 8364 | AAAUUAUUCAAAUCUUGAA |
| siRNA 2875 | 2875 | UCAAGAUUUGAAUAAUUUC | 8365 | GAAAUUAUUCAAAUCUUGA |
| siRNA 2876 | 2876 | CAAGAUUUGAAUAAUUUCA | 8366 | UGAAAUUAUUCAAAUCUUG |
| siRNA 2877 | 2877 | AAGAUUUGAAUAAUUUCAA | 8367 | UUGAAAUUAUUCAAAUCUU |
| siRNA 2878 | 2878 | AGAUUUGAAUAAUUUCAAU | 8368 | AUUGAAAUUAUUCAAAUCU |
| siRNA 2879 | 2879 | GAUUUGAAUAAUUUCAAUG | 8369 | CAUUGAAAUUAUUCAAAUC |
| siRNA 2880 | 2880 | AUUUGAAUAAUUUCAAUGG | 8370 | CCAUUGAAAUUAUUCAAAU |
| siRNA 2881 | 2881 | UUUGAAUAAUUUCAAUGGC | 8371 | GCCAUUGAAAUUAUUCAAA |
| siRNA 2882 | 2882 | UUGAAUAAUUUCAAUGGCG | 8372 | CGCCAUUGAAAUUAUUCAA |
| siRNA 2883 | 2883 | UGAAUAAUUUCAAUGGCGU | 8373 | ACGCCAUUGAAAUUAUUCA |
| siRNA 2884 | 2884 | GAAUAAUUUCAAUGGCGUA | 8374 | UACGCCAUUGAAAUUAUUC |
| siRNA 2885 | 2885 | AAUAAUUUCAAUGGCGUAU | 8375 | AUACGCCAUUGAAAUUAUU |
| siRNA 2886 | 2886 | AUAAUUUCAAUGGCGUAUU | 8376 | AAUACGCCAUUGAAAUUAU |
| siRNA 2887 | 2887 | UAAUUUCAAUGGCGUAUUG | 8377 | CAAUACGCCAUUGAAAUUA |
| siRNA 2888 | 2888 | AAUUUCAAUGGCGUAUUGG | 8378 | CCAAUACGCCAUUGAAAUU |
| siRNA 2889 | 2889 | AUUUCAAUGGCGUAUUGGA | 8379 | UCCAAUACGCCAUUGAAAU |
| siRNA 2890 | 2890 | UUUCAAUGGCGUAUUGGAG | 8380 | CUCCAAUACGCCAUUGAAA |
| siRNA 2891 | 2891 | UUCAAUGGCGUAUUGGAGA | 8381 | UCUCCAAUACGCCAUUGAA |
| siRNA 2892 | 2892 | UCAAUGGCGUAUUGGAGAU | 8382 | AUCUCCAAUACGCCAUUGA |
| siRNA 2893 | 2893 | CAAUGGCGUAUUGGAGAUA | 8383 | UAUCUCCAAUACGCCAUUG |
| siRNA 2894 | 2894 | AAUGGCGUAUUGGAGAUAG | 8384 | CUAUCUCCAAUACGCCAUU |
| siRNA 2895 | 2895 | AUGGCGUAUUGGAGAUAGU | 8385 | ACUAUCUCCAAUACGCCAU |
| siRNA 2896 | 2896 | UGGCGUAUUGGAGAUAGUC | 8386 | GACUAUCUCCAAUACGCCA |
| siRNA 2897 | 2897 | GGCGUAUUGGAGAUAGUCA | 8387 | UGACUAUCUCCAAUACGCC |
| siRNA 2898 | 2898 | GCGUAUUGGAGAUAGUCAG | 8388 | CUGACUAUCUCCAAUACGC |
| siRNA 2899 | 2899 | CGUAUUGGAGAUAGUCAGU | 8389 | ACUGACUAUCUCCAAUACG |
| siRNA 2900 | 2900 | GUAUUGGAGAUAGUCAGUG | 8390 | CACUGACUAUCUCCAAUAC |
| siRNA 2901 | 2901 | UAUUGGAGAUAGUCAGUGC | 8391 | GCACUGACUAUCUCCAAUA |
| siRNA 2902 | 2902 | AUUGGAGAUAGUCAGUGCA | 8392 | UGCACUGACUAUCUCCAAU |
| siRNA 2903 | 2903 | UUGGAGAUAGUCAGUGCAG | 8393 | CUGCACUGACUAUCUCCAA |
| siRNA 2904 | 2904 | UGGAGAUAGUCAGUGCAGU | 8394 | ACUGCACUGACUAUCUCCA |
| siRNA 2905 | 2905 | GGAGAUAGUCAGUGCAGUA | 8395 | UACUGCACUGACUAUCUCC |
| siRNA 2906 | 2906 | GAGAUAGUCAGUGCAGUAA | 8396 | UUACUGCACUGACUAUCUC |
| siRNA 2907 | 2907 | AGAUAGUCAGUGCAGUAAA | 8397 | UUUACUGCACUGACUAUCU |
| siRNA 2908 | 2908 | GAUAGUCAGUGCAGUAAAU | 8398 | AUUUACUGCACUGACUAUC |
| siRNA 2909 | 2909 | AUAGUCAGUGCAGUAAAUU | 8399 | AAUUUACUGCACUGACUAU |
| siRNA 2910 | 2910 | UAGUCAGUGCAGUAAAUUC | 8400 | GAAUUUACUGCACUGACUA |
| siRNA 2911 | 2911 | AGUCAGUGCAGUAAAUUCA | 8401 | UGAAUUUACUGCACUGACU |
| siRNA 2912 | 2912 | GUCAGUGCAGUAAAUUCAG | 8402 | CUGAAUUUACUGCACUGAC |
| siRNA 2913 | 2913 | UCAGUGCAGUAAAUUCAGU | 8403 | ACUGAAUUUACUGCACUGA |
| siRNA 2914 | 2914 | CAGUGCAGUAAAUUCAGUG | 8404 | CACUGAAUUUACUGCACUG |
| siRNA 2915 | 2915 | AGUGCAGUAAAUUCAGUGU | 8405 | ACACUGAAUUUACUGCACU |
| siRNA 2916 | 2916 | GUGCAGUAAAUUCAGUGUC | 8406 | GACACUGAAUUUACUGCAC |
| siRNA 2917 | 2917 | UGCAGUAAAUUCAGUGUCA | 8407 | UGACACUGAAUUUACUGCA |
| siRNA 2918 | 2918 | GCAGUAAAUUCAGUGUCAG | 8408 | CUGACACUGAAUUUACUGC |
| siRNA 2919 | 2919 | CAGUAAAUUCAGUGUCAGU | 8409 | ACUGACACUGAAUUUACUG |
| siRNA 2920 | 2920 | AGUAAAUUCAGUGUCAGUA | 8410 | UACUGACACUGAAUUUACU |
| siRNA 2921 | 2921 | GUAAAUUCAGUGUCAGUAU | 8411 | AUACUGACACUGAAUUUAC |
| siRNA 2922 | 2922 | UAAAUUCAGUGUCAGUAUA | 8412 | UAUACUGACACUGAAUUUA |
| siRNA 2923 | 2923 | AAAUUCAGUGUCAGUAUAC | 8413 | GUAUACUGACACUGAAUUU |
| siRNA 2924 | 2924 | AAUUCAGUGUCAGUAUACA | 8414 | UGUAUACUGACACUGAAUU |
| siRNA 2925 | 2925 | AUUCAGUGUCAGUAUACAG | 8415 | CUGUAUACUGACACUGAAU |
| siRNA 2926 | 2926 | UUCAGUGUCAGUAUACAGA | 8416 | UCUGUAUACUGACACUGAA |
| siRNA 2927 | 2927 | UCAGUGUCAGUAUACAGAC | 8417 | GUCUGUAUACUGACACUGA |
| siRNA 2928 | 2928 | CAGUGUCAGUAUACAGACU | 8418 | AGUCUGUAUACUGACACUG |
| siRNA 2929 | 2929 | AGUGUCAGUAUACAGACUA | 8419 | UAGUCUGUAUACUGACACU |
| siRNA 2930 | 2930 | GUGUCAGUAUACAGACUAG | 8420 | CUAGUCUGUAUACUGACAC |
| siRNA 2931 | 2931 | UGUCAGUAUACAGACUAGA | 8421 | UCUAGUCUGUAUACUGACA |
| siRNA 2932 | 2932 | GUCAGUAUACAGACUAGAC | 8422 | GUCUAGUCUGUAUACUGAC |
| siRNA 2933 | 2933 | UCAGUAUACAGACUAGACC | 8423 | GGUCUAGUCUGUAUACUGA |
| siRNA 2934 | 2934 | CAGUAUACAGACUAGACCA | 8424 | UGGUCUAGUCUGUAUACUG |
| siRNA 2935 | 2935 | AGUAUACAGACUAGACCAU | 8425 | AUGGUCUAGUCUGUAUACU |
| siRNA 2936 | 2936 | GUAUACAGACUAGACCAUA | 8426 | UAUGGUCUAGUCUGUAUAC |
| siRNA 2937 | 2937 | UAUACAGACUAGACCAUAC | 8427 | GUAUGGUCUAGUCUGUAUA |
| siRNA 2938 | 2938 | AUACAGACUAGACCAUACC | 8428 | GGUAUGGUCUAGUCUGUAU |
| siRNA 2939 | 2939 | UACAGACUAGACCAUACCU | 8429 | AGGUAUGGUCUAGUCUGUA |
| siRNA 2940 | 2940 | ACAGACUAGACCAUACCUU | 8430 | AAGGUAUGGUCUAGUCUGU |
| siRNA 2941 | 2941 | CAGACUAGACCAUACCUUU | 8431 | AAAGGUAUGGUCUAGUCUG |
| siRNA 2942 | 2942 | AGACUAGACCAUACCUUUG | 8432 | CAAAGGUAUGGUCUAGUCU |
| siRNA 2943 | 2943 | GACUAGACCAUACCUUUGA | 8433 | UCAAAGGUAUGGUCUAGUC |
| siRNA 2944 | 2944 | ACUAGACCAUACCUUUGAG | 8434 | CUCAAAGGUAUGGUCUAGU |
| siRNA 2945 | 2945 | CUAGACCAUACCUUUGAGG | 8435 | CCUCAAAGGUAUGGUCUAG |
| siRNA 2946 | 2946 | UAGACCAUACCUUUGAGGC | 8436 | GCCUCAAAGGUAUGGUCUA |
| siRNA 2947 | 2947 | AGACCAUACCUUUGAGGCA | 8437 | UGCCUCAAAGGUAUGGUCU |
| siRNA 2948 | 2948 | GACCAUACCUUUGAGGCAC | 8438 | GUGCCUCAAAGGUAUGGUC |
| siRNA 2949 | 2949 | ACCAUACCUUUGAGGCACU | 8439 | AGUGCCUCAAAGGUAUGGU |
| siRNA 2950 | 2950 | CCAUACCUUUGAGGCACUG | 8440 | CAGUGCCUCAAAGGUAUGG |
| siRNA 2951 | 2951 | CAUACCUUUGAGGCACUGC | 8441 | GCAGUGCCUCAAAGGUAUG |
| siRNA 2952 | 2952 | AUACCUUUGAGGCACUGCA | 8442 | UGCAGUGCCUCAAAGGUAU |
| siRNA 2953 | 2953 | UACCUUUGAGGCACUGCAG | 8443 | CUGCAGUGCCUCAAAGGUA |
| siRNA 2954 | 2954 | ACCUUUGAGGCACUGCAGG | 8444 | CCUGCAGUGCCUCAAAGGU |
| siRNA 2955 | 2955 | CCUUUGAGGCACUGCAGGA | 8445 | UCCUGCAGUGCCUCAAAGG |
| siRNA 2956 | 2956 | CUUUGAGGCACUGCAGGAA | 8446 | UUCCUGCAGUGCCUCAAAG |
| siRNA 2957 | 2957 | UUUGAGGCACUGCAGGAAA | 8447 | UUUCCUGCAGUGCCUCAAA |
| siRNA 2958 | 2958 | UUGAGGCACUGCAGGAAAG | 8448 | CUUUCCUGCAGUGCCUCAA |
| siRNA 2959 | 2959 | UGAGGCACUGCAGGAAAGG | 8449 | CCUUUCCUGCAGUGCCUCA |
| siRNA 2960 | 2960 | GAGGCACUGCAGGAAAGGA | 8450 | UCCUUUCCUGCAGUGCCUC |
| siRNA 2961 | 2961 | AGGCACUGCAGGAAAGGAA | 8451 | UUCCUUUCCUGCAGUGCCU |
| siRNA 2962 | 2962 | GGCACUGCAGGAAAGGAAA | 8452 | UUUCCUUUCCUGCAGUGCC |
| siRNA 2963 | 2963 | GCACUGCAGGAAAGGAAAA | 8453 | UUUUCCUUUCCUGCAGUGC |
| siRNA 2964 | 2964 | CACUGCAGGAAAGGAAAAG | 8454 | CUUUUCCUUUCCUGCAGUG |
| siRNA 2965 | 2965 | ACUGCAGGAAAGGAAAAGG | 8455 | CCUUUUCCUUUCCUGCAGU |
| siRNA 2966 | 2966 | CUGCAGGAAAGGAAAAGGA | 8456 | UCCUUUUCCUUUCCUGCAG |
| siRNA 2967 | 2967 | UGCAGGAAAGGAAAAGGAA | 8457 | UUCCUUUUCCUUUCCUGCA |
| siRNA 2968 | 2968 | GCAGGAAAGGAAAAGGAAA | 8458 | UUUCCUUUUCCUUUCCUGC |
| siRNA 2969 | 2969 | CAGGAAAGGAAAAGGAAAA | 8459 | UUUUCCUUUUCCUUUCCUG |
| siRNA 2970 | 2970 | AGGAAAGGAAAAGGAAAAU | 8460 | AUUUUCCUUUUCCUUUCCU |
| siRNA 2971 | 2971 | GGAAAGGAAAAGGAAAAUU | 8461 | AAUUUUCCUUUUCCUUUCC |
| siRNA 2972 | 2972 | GAAAGGAAAAGGAAAAUUU | 8462 | AAAUUUUCCUUUUCCUUUC |
| siRNA 2973 | 2973 | AAAGGAAAAGGAAAAUUUU | 8463 | AAAAUUUUCCUUUUCCUUU |
| siRNA 2974 | 2974 | AAGGAAAAGGAAAAUUUUG | 8464 | CAAAAUUUUCCUUUUCCUU |
| siRNA 2975 | 2975 | AGGAAAAGGAAAAUUUUGG | 8465 | CCAAAAUUUUCCUUUUCCU |
| siRNA 2976 | 2976 | GGAAAAGGAAAAUUUUGGA | 8466 | UCCAAAAUUUUCCUUUUCC |
| siRNA 2977 | 2977 | GAAAAGGAAAAUUUUGGAC | 8467 | GUCCAAAAUUUUCCUUUUC |
| siRNA 2978 | 2978 | AAAAGGAAAAUUUUGGACG | 8468 | CGUCCAAAAUUUUCCUUUU |
| siRNA 2979 | 2979 | AAAGGAAAAUUUUGGACGA | 8469 | UCGUCCAAAAUUUUCCUUU |
| siRNA 2980 | 2980 | AAGGAAAAUUUUGGACGAA | 8470 | UUCGUCCAAAAUUUUCCUU |
| siRNA 2981 | 2981 | AGGAAAAUUUUGGACGAAG | 8471 | CUUCGUCCAAAAUUUUCCU |
| siRNA 2982 | 2982 | GGAAAAUUUUGGACGAAGC | 8472 | GCUUCGUCCAAAAUUUUCC |
| siRNA 2983 | 2983 | GAAAAUUUUGGACGAAGCU | 8473 | AGCUUCGUCCAAAAUUUUC |
| siRNA 2984 | 2984 | AAAAUUUUGGACGAAGCUG | 8474 | CAGCUUCGUCCAAAAUUUU |
| siRNA 2985 | 2985 | AAAUUUUGGACGAAGCUGU | 8475 | ACAGCUUCGUCCAAAAUUU |
| siRNA 2986 | 2986 | AAUUUUGGACGAAGCUGUG | 8476 | CACAGCUUCGUCCAAAAUU |
| siRNA 2987 | 2987 | AUUUUGGACGAAGCUGUGG | 8477 | CCACAGCUUCGUCCAAAAU |
| siRNA 2988 | 2988 | UUUUGGACGAAGCUGUGGA | 8478 | UCCACAGCUUCGUCCAAAA |
| siRNA 2989 | 2989 | UUUGGACGAAGCUGUGGAA | 8479 | UUCCACAGCUUCGUCCAAA |
| siRNA 2990 | 2990 | UUGGACGAAGCUGUGGAAU | 8480 | AUUCCACAGCUUCGUCCAA |
| siRNA 2991 | 2991 | UGGACGAAGCUGUGGAAUU | 8481 | AAUUCCACAGCUUCGUCCA |
| siRNA 2992 | 2992 | GGACGAAGCUGUGGAAUUA | 8482 | UAAUUCCACAGCUUCGUCC |
| siRNA 2993 | 2993 | GACGAAGCUGUGGAAUUAA | 8483 | UUAAUUCCACAGCUUCGUC |
| siRNA 2994 | 2994 | ACGAAGCUGUGGAAUUAAG | 8484 | CUUAAUUCCACAGCUUCGU |
| siRNA 2995 | 2995 | CGAAGCUGUGGAAUUAAGU | 8485 | ACUUAAUUCCACAGCUUCG |
| siRNA 2996 | 2996 | GAAGCUGUGGAAUUAAGUC | 8486 | GACUUAAUUCCACAGCUUC |
| siRNA 2997 | 2997 | AAGCUGUGGAAUUAAGUCA | 8487 | UGACUUAAUUCCACAGCUU |
| siRNA 2998 | 2998 | AGCUGUGGAAUUAAGUCAA | 8488 | UUGACUUAAUUCCACAGCU |
| siRNA 2999 | 2999 | GCUGUGGAAUUAAGUCAAG | 8489 | CUUGACUUAAUUCCACAGC |
| siRNA 3000 | 3000 | CUGUGGAAUUAAGUCAAGA | 8490 | UCUUGACUUAAUUCCACAG |
| siRNA 3001 | 3001 | UGUGGAAUUAAGUCAAGAU | 8491 | AUCUUGACUUAAUUCCACA |
| siRNA 3002 | 3002 | GUGGAAUUAAGUCAAGAUC | 8492 | GAUCUUGACUUAAUUCCAC |
| siRNA 3003 | 3003 | UGGAAUUAAGUCAAGAUCA | 8493 | UGAUCUUGACUUAAUUCCA |
| siRNA 3004 | 3004 | GGAAUUAAGUCAAGAUCAC | 8494 | GUGAUCUUGACUUAAUUCC |
| siRNA 3005 | 3005 | GAAUUAAGUCAAGAUCACU | 8495 | AGUGAUCUUGACUUAAUUC |
| siRNA 3006 | 3006 | AAUUAAGUCAAGAUCACUU | 8496 | AAGUGAUCUUGACUUAAUU |
| siRNA 3007 | 3007 | AUUAAGUCAAGAUCACUUU | 8497 | AAAGUGAUCUUGACUUAAU |
| siRNA 3008 | 3008 | UUAAGUCAAGAUCACUUUA | 8498 | UAAAGUGAUCUUGACUUAA |
| siRNA 3009 | 3009 | UAAGUCAAGAUCACUUUAA | 8499 | UUAAAGUGAUCUUGACUUA |
| siRNA 3010 | 3010 | AAGUCAAGAUCACUUUAAA | 8500 | UUUAAAGUGAUCUUGACUU |
| siRNA 3011 | 3011 | AGUCAAGAUCACUUUAAAA | 8501 | UUUUAAAGUGAUCUUGACU |
| siRNA 3012 | 3012 | GUCAAGAUCACUUUAAAAA | 8502 | UUUUUAAAGUGAUCUUGAC |
| siRNA 3013 | 3013 | UCAAGAUCACUUUAAAAAA | 8503 | UUUUUUAAAGUGAUCUUGA |
| siRNA 3014 | 3014 | CAAGAUCACUUUAAAAAAU | 8504 | AUUUUUUAAAGUGAUCUUG |
| siRNA 3015 | 3015 | AAGAUCACUUUAAAAAAUA | 8505 | UAUUUUUUAAAGUGAUCUU |
| siRNA 3016 | 3016 | AGAUCACUUUAAAAAAUAC | 8506 | GUAUUUUUUAAAGUGAUCU |
| siRNA 3017 | 3017 | GAUCACUUUAAAAAAUACC | 8507 | GGUAUUUUUUAAAGUGAUC |
| siRNA 3018 | 3018 | AUCACUUUAAAAAAUACCU | 8508 | AGGUAUUUUUUAAAGUGAU |
| siRNA 3019 | 3019 | UCACUUUAAAAAAUACCUA | 8509 | UAGGUAUUUUUUAAAGUGA |
| siRNA 3020 | 3020 | CACUUUAAAAAAUACCUAG | 8510 | CUAGGUAUUUUUUAAAGUG |
| siRNA 3021 | 3021 | ACUUUAAAAAAUACCUAGU | 8511 | ACUAGGUAUUUUUUAAAGU |
| siRNA 3022 | 3022 | CUUUAAAAAAUACCUAGUA | 8512 | UACUAGGUAUUUUUUAAAG |
| siRNA 3023 | 3023 | UUUAAAAAAUACCUAGUAA | 8513 | UUACUAGGUAUUUUUUAAA |
| siRNA 3024 | 3024 | UUAAAAAAUACCUAGUAAA | 8514 | UUUACUAGGUAUUUUUUAA |
| siRNA 3025 | 3025 | UAAAAAAUACCUAGUAAAA | 8515 | UUUUACUAGGUAUUUUUUA |
| siRNA 3026 | 3026 | AAAAAAUACCUAGUAAAAC | 8516 | GUUUUACUAGGUAUUUUUU |
| siRNA 3027 | 3027 | AAAAAUACCUAGUAAAACU | 8517 | AGUUUUACUAGGUAUUUUU |
| siRNA 3028 | 3028 | AAAAUACCUAGUAAAACUU | 8518 | AAGUUUUACUAGGUAUUUU |
| siRNA 3029 | 3029 | AAAUACCUAGUAAAACUUA | 8519 | UAAGUUUUACUAGGUAUUU |
| siRNA 3030 | 3030 | AAUACCUAGUAAAACUUAA | 8520 | UUAAGUUUUACUAGGUAUU |
| siRNA 3031 | 3031 | AUACCUAGUAAAACUUAAG | 8521 | CUUAAGUUUUACUAGGUAU |
| siRNA 3032 | 3032 | UACCUAGUAAAACUUAAGU | 8522 | ACUUAAGUUUUACUAGGUA |
| siRNA 3033 | 3033 | ACCUAGUAAAACUUAAGUC | 8523 | GACUUAAGUUUUACUAGGU |
| siRNA 3034 | 3034 | CCUAGUAAAACUUAAGUCA | 8524 | UGACUUAAGUUUUACUAGG |
| siRNA 3035 | 3035 | CUAGUAAAACUUAAGUCAA | 8525 | UUGACUUAAGUUUUACUAG |
| siRNA 3036 | 3036 | UAGUAAAACUUAAGUCAAU | 8526 | AUUGACUUAAGUUUUACUA |
| siRNA 3037 | 3037 | AGUAAAACUUAAGUCAAUC | 8527 | GAUUGACUUAAGUUUUACU |
| siRNA 3038 | 3038 | GUAAAACUUAAGUCAAUCA | 8528 | UGAUUGACUUAAGUUUUAC |
| siRNA 3039 | 3039 | UAAAACUUAAGUCAAUCAA | 8529 | UUGAUUGACUUAAGUUUUA |
| siRNA 3040 | 3040 | AAAACUUAAGUCAAUCAAU | 8530 | AUUGAUUGACUUAAGUUUU |
| siRNA 3041 | 3041 | AAACUUAAGUCAAUCAAUC | 8531 | GAUUGAUUGACUUAAGUUU |
| siRNA 3042 | 3042 | AACUUAAGUCAAUCAAUCC | 8532 | GGAUUGAUUGACUUAAGUU |
| siRNA 3043 | 3043 | ACUUAAGUCAAUCAAUCCA | 8533 | UGGAUUGAUUGACUUAAGU |
| siRNA 3044 | 3044 | CUUAAGUCAAUCAAUCCAC | 8534 | GUGGAUUGAUUGACUUAAG |
| siRNA 3045 | 3045 | UUAAGUCAAUCAAUCCACC | 8535 | GGUGGAUUGAUUGACUUAA |
| siRNA 3046 | 3046 | UAAGUCAAUCAAUCCACCU | 8536 | AGGUGGAUUGAUUGACUUA |
| siRNA 3047 | 3047 | AAGUCAAUCAAUCCACCUU | 8537 | AAGGUGGAUUGAUUGACUU |
| siRNA 3048 | 3048 | AGUCAAUCAAUCCACCUUG | 8538 | CAAGGUGGAUUGAUUGACU |
| siRNA 3049 | 3049 | GUCAAUCAAUCCACCUUGU | 8539 | ACAAGGUGGAUUGAUUGAC |
| siRNA 3050 | 3050 | UCAAUCAAUCCACCUUGUG | 8540 | CACAAGGUGGAUUGAUUGA |
| siRNA 3051 | 3051 | CAAUCAAUCCACCUUGUGU | 8541 | ACACAAGGUGGAUUGAUUG |
| siRNA 3052 | 3052 | AAUCAAUCCACCUUGUGUG | 8542 | CACACAAGGUGGAUUGAUU |
| siRNA 3053 | 3053 | AUCAAUCCACCUUGUGUGC | 8543 | GCACACAAGGUGGAUUGAU |
| siRNA 3054 | 3054 | UCAAUCCACCUUGUGUGCC | 8544 | GGCACACAAGGUGGAUUGA |
| siRNA 3055 | 3055 | CAAUCCACCUUGUGUGCCU | 8545 | AGGCACACAAGGUGGAUUG |
| siRNA 3056 | 3056 | AAUCCACCUUGUGUGCCUU | 8546 | AAGGCACACAAGGUGGAUU |
| siRNA 3057 | 3057 | AUCCACCUUGUGUGCCUUU | 8547 | AAAGGCACACAAGGUGGAU |
| siRNA 3058 | 3058 | UCCACCUUGUGUGCCUUUU | 8548 | AAAAGGCACACAAGGUGGA |
| siRNA 3059 | 3059 | CCACCUUGUGUGCCUUUUU | 8549 | AAAAAGGCACACAAGGUGG |
| siRNA 3060 | 3060 | CACCUUGUGUGCCUUUUUU | 8550 | AAAAAAGGCACACAAGGUG |
| siRNA 3061 | 3061 | ACCUUGUGUGCCUUUUUUU | 8551 | AAAAAAAGGCACACAAGGU |
| siRNA 3062 | 3062 | CCUUGUGUGCCUUUUUUUG | 8552 | CAAAAAAAGGCACACAAGG |
| siRNA 3063 | 3063 | CUUGUGUGCCUUUUUUUGG | 8553 | CCAAAAAAAGGCACACAAG |
| siRNA 3064 | 3064 | UUGUGUGCCUUUUUUUGGA | 8554 | UCCAAAAAAAGGCACACAA |
| siRNA 3065 | 3065 | UGUGUGCCUUUUUUUGGAA | 8555 | UUCCAAAAAAAGGCACACA |
| siRNA 3066 | 3066 | GUGUGCCUUUUUUUGGAAU | 8556 | AUUCCAAAAAAAGGCACAC |
| siRNA 3067 | 3067 | UGUGCCUUUUUUUGGAAUA | 8557 | UAUUCCAAAAAAAGGCACA |
| siRNA 3068 | 3068 | GUGCCUUUUUUUGGAAUAU | 8558 | AUAUUCCAAAAAAAGGCAC |
| siRNA 3069 | 3069 | UGCCUUUUUUUGGAAUAUA | 8559 | UAUAUUCCAAAAAAAGGCA |
| siRNA 3070 | 3070 | GCCUUUUUUUGGAAUAUAU | 8560 | AUAUAUUCCAAAAAAAGGC |
| siRNA 3071 | 3071 | CCUUUUUUUGGAAUAUAUU | 8561 | AAUAUAUUCCAAAAAAAGG |
| siRNA 3072 | 3072 | CUUUUUUUGGAAUAUAUUU | 8562 | AAAUAUAUUCCAAAAAAAG |
| siRNA 3073 | 3073 | UUUUUUUGGAAUAUAUUUA | 8563 | UAAAUAUAUUCCAAAAAAA |
| siRNA 3074 | 3074 | UUUUUUGGAAUAUAUUUAA | 8564 | UUAAAUAUAUUCCAAAAAA |
| siRNA 3075 | 3075 | UUUUUGGAAUAUAUUUAAC | 8565 | GUUAAAUAUAUUCCAAAAA |
| siRNA 3076 | 3076 | UUUUGGAAUAUAUUUAACA | 8566 | UGUUAAAUAUAUUCCAAAA |
| siRNA 3077 | 3077 | UUUGGAAUAUAUUUAACAA | 8567 | UUGUUAAAUAUAUUCCAAA |
| siRNA 3078 | 3078 | UUGGAAUAUAUUUAACAAA | 8568 | UUUGUUAAAUAUAUUCCAA |
| siRNA 3079 | 3079 | UGGAAUAUAUUUAACAAAU | 8569 | AUUUGUUAAAUAUAUUCCA |
| siRNA 3080 | 3080 | GGAAUAUAUUUAACAAAUA | 8570 | UAUUUGUUAAAUAUAUUCC |
| siRNA 3081 | 3081 | GAAUAUAUUUAACAAAUAU | 8571 | AUAUUUGUUAAAUAUAUUC |
| siRNA 3082 | 3082 | AAUAUAUUUAACAAAUAUU | 8572 | AAUAUUUGUUAAAUAUAUU |
| siRNA 3083 | 3083 | AUAUAUUUAACAAAUAUUC | 8573 | GAAUAUUUGUUAAAUAUAU |
| siRNA 3084 | 3084 | UAUAUUUAACAAAUAUUCU | 8574 | AGAAUAUUUGUUAAAUAUA |
| siRNA 3085 | 3085 | AUAUUUAACAAAUAUUCUG | 8575 | CAGAAUAUUUGUUAAAUAU |
| siRNA 3086 | 3086 | UAUUUAACAAAUAUUCUGA | 8576 | UCAGAAUAUUUGUUAAAUA |
| siRNA 3087 | 3087 | AUUUAACAAAUAUUCUGAA | 8577 | UUCAGAAUAUUUGUUAAAU |
| siRNA 3088 | 3088 | UUUAACAAAUAUUCUGAAG | 8578 | CUUCAGAAUAUUUGUUAAA |
| siRNA 3089 | 3089 | UUAACAAAUAUUCUGAAGA | 8579 | UCUUCAGAAUAUUUGUUAA |
| siRNA 3090 | 3090 | UAACAAAUAUUCUGAAGAC | 8580 | GUCUUCAGAAUAUUUGUUA |
| siRNA 3091 | 3091 | AACAAAUAUUCUGAAGACC | 8581 | GGUCUUCAGAAUAUUUGUU |
| siRNA 3092 | 3092 | ACAAAUAUUCUGAAGACCG | 8582 | CGGUCUUCAGAAUAUUUGU |
| siRNA 3093 | 3093 | CAAAUAUUCUGAAGACCGA | 8583 | UCGGUCUUCAGAAUAUUUG |
| siRNA 3094 | 3094 | AAAUAUUCUGAAGACCGAA | 8584 | UUCGGUCUUCAGAAUAUUU |
| siRNA 3095 | 3095 | AAUAUUCUGAAGACCGAAG | 8585 | CUUCGGUCUUCAGAAUAUU |
| siRNA 3096 | 3096 | AUAUUCUGAAGACCGAAGA | 8586 | UCUUCGGUCUUCAGAAUAU |
| siRNA 3097 | 3097 | UAUUCUGAAGACCGAAGAA | 8587 | UUCUUCGGUCUUCAGAAUA |
| siRNA 3098 | 3098 | AUUCUGAAGACCGAAGAAG | 8588 | CUUCUUCGGUCUUCAGAAU |
| siRNA 3099 | 3099 | UUCUGAAGACCGAAGAAGG | 8589 | CCUUCUUCGGUCUUCAGAA |
| siRNA 3100 | 3100 | UCUGAAGACCGAAGAAGGG | 8590 | CCCUUCUUCGGUCUUCAGA |
| siRNA 3101 | 3101 | CUGAAGACCGAAGAAGGGA | 8591 | UCCCUUCUUCGGUCUUCAG |
| siRNA 3102 | 3102 | UGAAGACCGAAGAAGGGAA | 8592 | UUCCCUUCUUCGGUCUUCA |
| siRNA 3103 | 3103 | GAAGACCGAAGAAGGGAAU | 8593 | AUUCCCUUCUUCGGUCUUC |
| siRNA 3104 | 3104 | AAGACCGAAGAAGGGAAUA | 8594 | UAUUCCCUUCUUCGGUCUU |
| siRNA 3105 | 3105 | AGACCGAAGAAGGGAAUAA | 8595 | UUAUUCCCUUCUUCGGUCU |
| siRNA 3106 | 3106 | GACCGAAGAAGGGAAUAAU | 8596 | AUUAUUCCCUUCUUCGGUC |
| siRNA 3107 | 3107 | ACCGAAGAAGGGAAUAAUG | 8597 | CAUUAUUCCCUUCUUCGGU |
| siRNA 3108 | 3108 | CCGAAGAAGGGAAUAAUGA | 8598 | UCAUUAUUCCCUUCUUCGG |
| siRNA 3109 | 3109 | CGAAGAAGGGAAUAAUGAU | 8599 | AUCAUUAUUCCCUUCUUCG |
| siRNA 3110 | 3110 | GAAGAAGGGAAUAAUGAUU | 8600 | AAUCAUUAUUCCCUUCUUC |
| siRNA 3111 | 3111 | AAGAAGGGAAUAAUGAUUU | 8601 | AAAUCAUUAUUCCCUUCUU |
| siRNA 3112 | 3112 | AGAAGGGAAUAAUGAUUUU | 8602 | AAAAUCAUUAUUCCCUUCU |
| siRNA 3113 | 3113 | GAAGGGAAUAAUGAUUUUU | 8603 | AAAAAUCAUUAUUCCCUUC |
| siRNA 3114 | 3114 | AAGGGAAUAAUGAUUUUUU | 8604 | AAAAAAUCAUUAUUCCCUU |
| siRNA 3115 | 3115 | AGGGAAUAAUGAUUUUUUA | 8605 | UAAAAAAUCAUUAUUCCCU |
| siRNA 3116 | 3116 | GGGAAUAAUGAUUUUUUAA | 8606 | UUAAAAAAUCAUUAUUCCC |
| siRNA 3117 | 3117 | GGAAUAAUGAUUUUUUAAA | 8607 | UUUAAAAAAUCAUUAUUCC |
| siRNA 3118 | 3118 | GAAUAAUGAUUUUUUAAAA | 8608 | UUUUAAAAAAUCAUUAUUC |
| siRNA 3119 | 3119 | AAUAAUGAUUUUUUAAAAA | 8609 | UUUUUAAAAAAUCAUUAUU |
| siRNA 3120 | 3120 | AUAAUGAUUUUUUAAAAAA | 8610 | UUUUUUAAAAAAUCAUUAU |
| siRNA 3121 | 3121 | UAAUGAUUUUUUAAAAAAG | 8611 | CUUUUUUAAAAAAUCAUUA |
| siRNA 3122 | 3122 | AAUGAUUUUUUAAAAAAGA | 8612 | UCUUUUUUAAAAAAUCAUU |
| siRNA 3123 | 3123 | AUGAUUUUUUAAAAAAGAA | 8613 | UUCUUUUUUAAAAAAUCAU |
| siRNA 3124 | 3124 | UGAUUUUUUAAAAAAGAAA | 8614 | UUUCUUUUUUAAAAAAUCA |
| siRNA 3125 | 3125 | GAUUUUUUAAAAAAGAAAG | 8615 | CUUUCUUUUUUAAAAAAUC |
| siRNA 3126 | 3126 | AUUUUUUAAAAAAGAAAGG | 8616 | CCUUUCUUUUUUAAAAAAU |
| siRNA 3127 | 3127 | UUUUUUAAAAAAGAAAGGG | 8617 | CCCUUUCUUUUUUAAAAAA |
| siRNA 3128 | 3128 | UUUUUAAAAAAGAAAGGGA | 8618 | UCCCUUUCUUUUUUAAAAA |
| siRNA 3129 | 3129 | UUUUAAAAAAGAAAGGGAA | 8619 | UUCCCUUUCUUUUUUAAAA |
| siRNA 3130 | 3130 | UUUAAAAAAGAAAGGGAAA | 8620 | UUUCCCUUUCUUUUUUAAA |
| siRNA 3131 | 3131 | UUAAAAAAGAAAGGGAAAG | 8621 | CUUUCCCUUUCUUUUUUAA |
| siRNA 3132 | 3132 | UAAAAAAGAAAGGGAAAGA | 8622 | UCUUUCCCUUUUUUUUUA |
| siRNA 3133 | 3133 | AAAAAAGAAAGGGAAAGAU | 8623 | AUCUUUCCCUUUCUUUUUU |
| siRNA 3134 | 3134 | AAAAAGAAAGGGAAAGAUU | 8624 | AAUCUUUCCCUUUCUUUUU |
| siRNA 3135 | 3135 | AAAAGAAAGGGAAAGAUUU | 8625 | AAAUCUUUCCCUUUCUUUU |
| siRNA 3136 | 3136 | AAAGAAAGGGAAAGAUUUA | 8626 | UAAAUCUUUCCCUUUCUUU |
| siRNA 3137 | 3137 | AAGAAAGGGAAAGAUUUAA | 8627 | UUAAAUCUUUCCCUUUCUU |
| siRNA 3138 | 3138 | AGAAAGGGAAAGAUUUAAU | 8628 | AUUAAAUCUUUCCCUUUCU |
| siRNA 3139 | 3139 | GAAAGGGAAAGAUUUAAUC | 8629 | GAUUAAAUCUUUCCCUUUC |
| siRNA 3140 | 3140 | AAAGGGAAAGAUUUAAUCA | 8630 | UGAUUAAAUCUUUCCCUUU |
| siRNA 3141 | 3141 | AAGGGAAAGAUUUAAUCAA | 8631 | UUGAUUAAAUCUUUCCCUU |
| siRNA 3142 | 3142 | AGGGAAAGAUUUAAUCAAU | 8632 | AUUGAUUAAAUCUUUCCCU |
| siRNA 3143 | 3143 | GGGAAAGAUUUAAUCAAUU | 8633 | AAUUGAUUAAAUCUUUCCC |
| siRNA 3144 | 3144 | GGAAAGAUUUAAUCAAUUU | 8634 | AAAUUGAUUAAAUCUUUCC |
| siRNA 3145 | 3145 | GAAAGAUUUAAUCAAUUUC | 8635 | GAAAUUGAUUAAAUCUUUC |
| siRNA 3146 | 3146 | AAAGAUUUAAUCAAUUUCA | 8636 | UGAAAUUGAUUAAAUCUUU |
| siRNA 3147 | 3147 | AAGAUUUAAUCAAUUUCAG | 8637 | CUGAAAUUGAUUAAAUCUU |
| siRNA 3148 | 3148 | AGAUUUAAUCAAUUUCAGU | 8638 | ACUGAAAUUGAUUAAAUCU |
| siRNA 3149 | 3149 | GAUUUAAUCAAUUUCAGUA | 8639 | UACUGAAAUUGAUUAAAUC |
| siRNA 3150 | 3150 | AUUUAAUCAAUUUCAGUAA | 8640 | UUACUGAAAUUGAUUAAAU |
| siRNA 3151 | 3151 | UUUAAUCAAUUUCAGUAAG | 8641 | CUUACUGAAAUUGAUUAAA |
| siRNA 3152 | 3152 | UUAAUCAAUUUCAGUAAGA | 8642 | UCUUACUGAAAUUGAUUAA |
| siRNA 3153 | 3153 | UAAUCAAUUUCAGUAAGAG | 8643 | CUCUUACUGAAAUUGAUUA |
| siRNA 3154 | 3154 | AAUCAAUUUCAGUAAGAGG | 8644 | CCUCUUACUGAAAUUGAUU |
| siRNA 3155 | 3155 | AUCAAUUUCAGUAAGAGGA | 8645 | UCCUCUUACUGAAAUUGAU |
| siRNA 3156 | 3156 | UCAAUUUCAGUAAGAGGAG | 8646 | CUCCUCUUACUGAAAUUGA |
| siRNA 3157 | 3157 | CAAUUUCAGUAAGAGGAGG | 8647 | CCUCCUCUUACUGAAAUUG |
| siRNA 3158 | 3158 | AAUUUCAGUAAGAGGAGGA | 8648 | UCCUCCUCUUACUGAAAUU |
| siRNA 3159 | 3159 | AUUUCAGUAAGAGGAGGAA | 8649 | UUCCUCCUCUUACUGAAAU |
| siRNA 3160 | 3160 | UUUCAGUAAGAGGAGGAAA | 8650 | UUUCCUCCUCUUACUGAAA |
| siRNA 3161 | 3161 | UUCAGUAAGAGGAGGAAAG | 8651 | CUUUCCUCCUCUUACUGAA |
| siRNA 3162 | 3162 | UCAGUAAGAGGAGGAAAGU | 8652 | ACUUUCCUCCUCUUACUGA |
| siRNA 3163 | 3163 | CAGUAAGAGGAGGAAAGUA | 8653 | UACUUUCCUCCUCUUACUG |
| siRNA 3164 | 3164 | AGUAAGAGGAGGAAAGUAG | 8654 | CUACUUUCCUCCUCUUACU |
| siRNA 3165 | 3165 | GUAAGAGGAGGAAAGUAGC | 8655 | GCUACUUUCCUCCUCUUAC |
| siRNA 3166 | 3166 | UAAGAGGAGGAAAGUAGCU | 8656 | AGCUACUUUCCUCCUCUUA |
| siRNA 3167 | 3167 | AAGAGGAGGAAAGUAGCUG | 8657 | CAGCUACUUUCCUCCUCUU |
| siRNA 3168 | 3168 | AGAGGAGGAAAGUAGCUGA | 8658 | UCAGCUACUUUCCUCCUCU |
| siRNA 3169 | 3169 | GAGGAGGAAAGUAGCUGAA | 8659 | UUCAGCUACUUUCCUCCUC |
| siRNA 3170 | 3170 | AGGAGGAAAGUAGCUGAAA | 8660 | UUUCAGCUACUUUCCUCCU |
| siRNA 3171 | 3171 | GGAGGAAAGUAGCUGAAAU | 8661 | AUUUCAGCUACUUUCCUCC |
| siRNA 3172 | 3172 | GAGGAAAGUAGCUGAAAUU | 8662 | AAUUUCAGCUACUUUCCUC |
| siRNA 3173 | 3173 | AGGAAAGUAGCUGAAAUUA | 8663 | UAAUUUCAGCUACUUUCCU |
| siRNA 3174 | 3174 | GGAAAGUAGCUGAAAUUAC | 8664 | GUAAUUUCAGCUACUUUCC |
| siRNA 3175 | 3175 | GAAAGUAGCUGAAAUUACU | 8665 | AGUAAUUUCAGCUACUUUC |
| siRNA 3176 | 3176 | AAAGUAGCUGAAAUUACUG | 8666 | CAGUAAUUUCAGCUACUUU |
| siRNA 3177 | 3177 | AAGUAGCUGAAAUUACUGG | 8667 | CCAGUAAUUUCAGCUACUU |
| siRNA 3178 | 3178 | AGUAGCUGAAAUUACUGGA | 8668 | UCCAGUAAUUUCAGCUACU |
| siRNA 3179 | 3179 | GUAGCUGAAAUUACUGGAG | 8669 | CUCCAGUAAUUUCAGCUAC |
| siRNA 3180 | 3180 | UAGCUGAAAUUACUGGAGA | 8670 | UCUCCAGUAAUUUCAGCUA |
| siRNA 3181 | 3181 | AGCUGAAAUUACUGGAGAA | 8671 | UUCUCCAGUAAUUUCAGCU |
| siRNA 3182 | 3182 | GCUGAAAUUACUGGAGAAA | 8672 | UUUCUCCAGUAAUUUCAGC |
| siRNA 3183 | 3183 | CUGAAAUUACUGGAGAAAU | 8673 | AUUUCUCCAGUAAUUUCAG |
| siRNA 3184 | 3184 | UGAAAUUACUGGAGAAAUU | 8674 | AAUUUCUCCAGUAAUUUCA |
| siRNA 3185 | 3185 | GAAAUUACUGGAGAAAUUC | 8675 | GAAUUUCUCCAGUAAUUUC |
| siRNA 3186 | 3186 | AAAUUACUGGAGAAAUUCA | 8676 | UGAAUUUCUCCAGUAAUUU |
| siRNA 3187 | 3187 | AAUUACUGGAGAAAUUCAG | 8677 | CUGAAUUUCUCCAGUAAUU |
| siRNA 3188 | 3188 | AUUACUGGAGAAAUUCAGC | 8678 | GCUGAAUUUCUCCAGUAAU |
| siRNA 3189 | 3189 | UUACUGGAGAAAUUCAGCA | 8679 | UGCUGAAUUUCUCCAGUAA |
| siRNA 3190 | 3190 | UACUGGAGAAAUUCAGCAG | 8680 | CUGCUGAAUUUCUCCAGUA |
| siRNA 3191 | 3191 | ACUGGAGAAAUUCAGCAGU | 8681 | ACUGCUGAAUUUCUCCAGU |
| siRNA 3192 | 3192 | CUGGAGAAAUUCAGCAGUA | 8682 | UACUGCUGAAUUUCUCCAG |
| siRNA 3193 | 3193 | UGGAGAAAUUCAGCAGUAU | 8683 | AUACUGCUGAAUUUCUCCA |
| siRNA 3194 | 3194 | GGAGAAAUUCAGCAGUAUC | 8684 | GAUACUGCUGAAUUUCUCC |
| siRNA 3195 | 3195 | GAGAAAUUCAGCAGUAUCA | 8685 | UGAUACUGCUGAAUUUCUC |
| siRNA 3196 | 3196 | AGAAAUUCAGCAGUAUCAG | 8686 | CUGAUACUGCUGAAUUUCU |
| siRNA 3197 | 3197 | GAAAUUCAGCAGUAUCAGA | 8687 | UCUGAUACUGCUGAAUUUC |
| siRNA 3198 | 3198 | AAAUUCAGCAGUAUCAGAA | 8688 | UUCUGAUACUGCUGAAUUU |
| siRNA 3199 | 3199 | AAUUCAGCAGUAUCAGAAU | 8689 | AUUCUGAUACUGCUGAAUU |
| siRNA 3200 | 3200 | AUUCAGCAGUAUCAGAAUC | 8690 | GAUUCUGAUACUGCUGAAU |
| siRNA 3201 | 3201 | UUCAGCAGUAUCAGAAUCA | 8691 | UGAUUCUGAUACUGCUGAA |
| siRNA 3202 | 3202 | UCAGCAGUAUCAGAAUCAG | 8692 | CUGAUUCUGAUACUGCUGA |
| siRNA 3203 | 3203 | CAGCAGUAUCAGAAUCAGC | 8693 | GCUGAUUCUGAUACUGCUG |
| siRNA 3204 | 3204 | AGCAGUAUCAGAAUCAGCC | 8694 | GGCUGAUUCUGAUACUGCU |
| siRNA 3205 | 3205 | GCAGUAUCAGAAUCAGCCU | 8695 | AGGCUGAUUCUGAUACUGC |
| siRNA 3206 | 3206 | CAGUAUCAGAAUCAGCCUU | 8696 | AAGGCUGAUUCUGAUACUG |
| siRNA 3207 | 3207 | AGUAUCAGAAUCAGCCUUA | 8697 | UAAGGCUGAUUCUGAUACU |
| siRNA 3208 | 3208 | GUAUCAGAAUCAGCCUUAC | 8698 | GUAAGGCUGAUUCUGAUAC |
| siRNA 3209 | 3209 | UAUCAGAAUCAGCCUUACU | 8699 | AGUAAGGCUGAUUCUGAUA |
| siRNA 3210 | 3210 | AUCAGAAUCAGCCUUACUG | 8700 | CAGUAAGGCUGAUUCUGAU |
| siRNA 3211 | 3211 | UCAGAAUCAGCCUUACUGU | 8701 | ACAGUAAGGCUGAUUCUGA |
| siRNA 3212 | 3212 | CAGAAUCAGCCUUACUGUU | 8702 | AACAGUAAGGCUGAUUCUG |
| siRNA 3213 | 3213 | AGAAUCAGCCUUACUGUUU | 8703 | AAACAGUAAGGCUGAUUCU |
| siRNA 3214 | 3214 | GAAUCAGCCUUACUGUUUA | 8704 | UAAACAGUAAGGCUGAUUC |
| siRNA 3215 | 3215 | AAUCAGCCUUACUGUUUAC | 8705 | GUAAACAGUAAGGCUGAUU |
| siRNA 3216 | 3216 | AUCAGCCUUACUGUUUACG | 8706 | CGUAAACAGUAAGGCUGAU |
| siRNA 3217 | 3217 | UCAGCCUUACUGUUUACGG | 8707 | CCGUAAACAGUAAGGCUGA |
| siRNA 3218 | 3218 | CAGCCUUACUGUUUACGGA | 8708 | UCCGUAAACAGUAAGGCUG |
| siRNA 3219 | 3219 | AGCCUUACUGUUUACGGAU | 8709 | AUCCGUAAACAGUAAGGCU |
| siRNA 3220 | 3220 | GCCUUACUGUUUACGGAUA | 8710 | UAUCCGUAAACAGUAAGGC |
| siRNA 3221 | 3221 | CCUUACUGUUUACGGAUAG | 8711 | CUAUCCGUAAACAGUAAGG |
| siRNA 3222 | 3222 | CUUACUGUUUACGGAUAGA | 8712 | UCUAUCCGUAAACAGUAAG |
| siRNA 3223 | 3223 | UUACUGUUUACGGAUAGAA | 8713 | UUCUAUCCGUAAACAGUAA |
| siRNA 3224 | 3224 | UACUGUUUACGGAUAGAAC | 8714 | GUUCUAUCCGUAAACAGUA |
| siRNA 3225 | 3225 | ACUGUUUACGGAUAGAACC | 8715 | GGUUCUAUCCGUAAACAGU |
| siRNA 3226 | 3226 | CUGUUUACGGAUAGAACCA | 8716 | UGGUUCUAUCCGUAAACAG |
| siRNA 3227 | 3227 | UGUUUACGGAUAGAACCAG | 8717 | CUGGUUCUAUCCGUAAACA |
| siRNA 3228 | 3228 | GUUUACGGAUAGAACCAGA | 8718 | UCUGGUUCUAUCCGUAAAC |
| siRNA 3229 | 3229 | UUUACGGAUAGAACCAGAU | 8719 | AUCUGGUUCUAUCCGUAAA |
| siRNA 3230 | 3230 | UUACGGAUAGAACCAGAUA | 8720 | UAUCUGGUUCUAUCCGUAA |
| siRNA 3231 | 3231 | UACGGAUAGAACCAGAUAU | 8721 | AUAUCUGGUUCUAUCCGUA |
| siRNA 3232 | 3232 | ACGGAUAGAACCAGAUAUG | 8722 | CAUAUCUGGUUCUAUCCGU |
| siRNA 3233 | 3233 | CGGAUAGAACCAGAUAUGA | 8723 | UCAUAUCUGGUUCUAUCCG |
| siRNA 3234 | 3234 | GGAUAGAACCAGAUAUGAG | 8724 | CUCAUAUCUGGUUCUAUCC |
| siRNA 3235 | 3235 | GAUAGAACCAGAUAUGAGG | 8725 | CCUCAUAUCUGGUUCUAUC |
| siRNA 3236 | 3236 | AUAGAACCAGAUAUGAGGA | 8726 | UCCUCAUAUCUGGUUCUAU |
| siRNA 3237 | 3237 | UAGAACCAGAUAUGAGGAG | 8727 | CUCCUCAUAUCUGGUUCUA |
| siRNA 3238 | 3238 | AGAACCAGAUAUGAGGAGA | 8728 | UCUCCUCAUAUCUGGUUCU |
| siRNA 3239 | 3239 | GAACCAGAUAUGAGGAGAU | 8729 | AUCUCCUCAUAUCUGGUUC |
| siRNA 3240 | 3240 | AACCAGAUAUGAGGAGAUU | 8730 | AAUCUCCUCAUAUCUGGUU |
| siRNA 3241 | 3241 | ACCAGAUAUGAGGAGAUUC | 8731 | GAAUCUCCUCAUAUCUGGU |
| siRNA 3242 | 3242 | CCAGAUAUGAGGAGAUUCU | 8732 | AGAAUCUCCUCAUAUCUGG |
| siRNA 3243 | 3243 | CAGAUAUGAGGAGAUUCUU | 8733 | AAGAAUCUCCUCAUAUCUG |
| siRNA 3244 | 3244 | AGAUAUGAGGAGAUUCUUU | 8734 | AAAGAAUCUCCUCAUAUCU |
| siRNA 3245 | 3245 | GAUAUGAGGAGAUUCUUUG | 8735 | CAAAGAAUCUCCUCAUAUC |
| siRNA 3246 | 3246 | AUAUGAGGAGAUUCUUUGA | 8736 | UCAAAGAAUCUCCUCAUAU |
| siRNA 3247 | 3247 | UAUGAGGAGAUUCUUUGAA | 8737 | UUCAAAGAAUCUCCUCAUA |
| siRNA 3248 | 3248 | AUGAGGAGAUUCUUUGAAA | 8738 | UUUCAAAGAAUCUCCUCAU |
| siRNA 3249 | 3249 | UGAGGAGAUUCUUUGAAAA | 8739 | UUUUCAAAGAAUCUCCUCA |
| siRNA 3250 | 3250 | GAGGAGAUUCUUUGAAAAC | 8740 | GUUUUCAAAGAAUCUCCUC |
| siRNA 3251 | 3251 | AGGAGAUUCUUUGAAAACC | 8741 | GGUUUUCAAAGAAUCUCCU |
| siRNA 3252 | 3252 | GGAGAUUCUUUGAAAACCU | 8742 | AGGUUUUCAAAGAAUCUCC |
| siRNA 3253 | 3253 | GAGAUUCUUUGAAAACCUU | 8743 | AAGGUUUUCAAAGAAUCUC |
| siRNA 3254 | 3254 | AGAUUCUUUGAAAACCUUA | 8744 | UAAGGUUUUCAAAGAAUCU |
| siRNA 3255 | 3255 | GAUUCUUUGAAAACCUUAA | 8745 | UUAAGGUUUUCAAAGAAUC |
| siRNA 3256 | 3256 | AUUCUUUGAAAACCUUAAC | 8746 | GUUAAGGUUUUCAAAGAAU |
| siRNA 3257 | 3257 | UUCUUUGAAAACCUUAACC | 8747 | GGUUAAGGUUUUCAAAGAA |
| siRNA 3258 | 3258 | UCUUUGAAAACCUUAACCC | 8748 | GGGUUAAGGUUUUCAAAGA |
| siRNA 3259 | 3259 | CUUUGAAAACCUUAACCCC | 8749 | GGGGUUAAGGUUUUCAAAG |
| siRNA 3260 | 3260 | UUUGAAAACCUUAACCCCA | 8750 | UGGGGUUAAGGUUUUCAAA |
| siRNA 3261 | 3261 | UUGAAAACCUUAACCCCAU | 8751 | AUGGGGUUAAGGUUUUCAA |
| siRNA 3262 | 3262 | UGAAAACCUUAACCCCAUG | 8752 | CAUGGGGUUAAGGUUUUCA |
| siRNA 3263 | 3263 | GAAAACCUUAACCCCAUGG | 8753 | CCAUGGGGUUAAGGUUUUC |
| siRNA 3264 | 3264 | AAAACCUUAACCCCAUGGG | 8754 | CCCAUGGGGUUAAGGUUUU |
| siRNA 3265 | 3265 | AAACCUUAACCCCAUGGGA | 8755 | UCCCAUGGGGUUAAGGUUU |
| siRNA 3266 | 3266 | AACCUUAACCCCAUGGGAA | 8756 | UUCCCAUGGGGUUAAGGUU |
| siRNA 3267 | 3267 | ACCUUAACCCCAUGGGAAG | 8757 | CUUCCCAUGGGGUUAAGGU |
| siRNA 3268 | 3268 | CCUUAACCCCAUGGGAAGU | 8758 | ACUUCCCAUGGGGUUAAGG |
| siRNA 3269 | 3269 | CUUAACCCCAUGGGAAGUG | 8759 | CACUUCCCAUGGGGUUAAG |
| siRNA 3270 | 3270 | UUAACCCCAUGGGAAGUGC | 8760 | GCACUUCCCAUGGGGUUAA |
| siRNA 3271 | 3271 | UAACCCCAUGGGAAGUGCA | 8761 | UGCACUUCCCAUGGGGUUA |
| siRNA 3272 | 3272 | AACCCCAUGGGAAGUGCAU | 8762 | AUGCACUUCCCAUGGGGUU |
| siRNA 3273 | 3273 | ACCCCAUGGGAAGUGCAUC | 8763 | GAUGCACUUCCCAUGGGGU |
| siRNA 3274 | 3274 | CCCCAUGGGAAGUGCAUCU | 8764 | AGAUGCACUUCCCAUGGGG |
| siRNA 3275 | 3275 | CCCAUGGGAAGUGCAUCUG | 8765 | CAGAUGCACUUCCCAUGGG |
| siRNA 3276 | 3276 | CCAUGGGAAGUGCAUCUGA | 8766 | UCAGAUGCACUUCCCAUGG |
| siRNA 3277 | 3277 | CAUGGGAAGUGCAUCUGAA | 8767 | UUCAGAUGCACUUCCCAUG |
| siRNA 3278 | 3278 | AUGGGAAGUGCAUCUGAAA | 8768 | UUUCAGAUGCACUUCCCAU |
| siRNA 3279 | 3279 | UGGGAAGUGCAUCUGAAAA | 8769 | UUUUCAGAUGCACUUCCCA |
| siRNA 3280 | 3280 | GGGAAGUGCAUCUGAAAAA | 8770 | UUUUUCAGAUGCACUUCCC |
| siRNA 3281 | 3281 | GGAAGUGCAUCUGAAAAAG | 8771 | CUUUUUCAGAUGCACUUCC |
| siRNA 3282 | 3282 | GAAGUGCAUCUGAAAAAGA | 8772 | UCUUUUUCAGAUGCACUUC |
| siRNA 3283 | 3283 | AAGUGCAUCUGAAAAAGAG | 8773 | CUCUUUUUCAGAUGCACUU |
| siRNA 3284 | 3284 | AGUGCAUCUGAAAAAGAGU | 8774 | ACUCUUUUUCAGAUGCACU |
| siRNA 3285 | 3285 | GUGCAUCUGAAAAAGAGUU | 8775 | AACUCUUUUUCAGAUGCAC |
| siRNA 3286 | 3286 | UGCAUCUGAAAAAGAGUUU | 8776 | AAACUCUUUUUCAGAUGCA |
| siRNA 3287 | 3287 | GCAUCUGAAAAAGAGUUUA | 8777 | UAAACUCUUUUUCAGAUGC |
| siRNA 3288 | 3288 | CAUCUGAAAAAGAGUUUAC | 8778 | GUAAACUCUUUUUCAGAUG |
| siRNA 3289 | 3289 | AUCUGAAAAAGAGUUUACA | 8779 | UGUAAACUCUUUUUCAGAU |
| siRNA 3290 | 3290 | UCUGAAAAAGAGUUUACAG | 8780 | CUGUAAACUCUUUUUCAGA |
| siRNA 3291 | 3291 | CUGAAAAAGAGUUUACAGA | 8781 | UCUGUAAACUCUUUUUCAG |
| siRNA 3292 | 3292 | UGAAAAAGAGUUUACAGAU | 8782 | AUCUGUAAACUCUUUUUCA |
| siRNA 3293 | 3293 | GAAAAAGAGUUUACAGAUU | 8783 | AAUCUGUAAACUCUUUUUC |
| siRNA 3294 | 3294 | AAAAAGAGUUUACAGAUUA | 8784 | UAAUCUGUAAACUCUUUUU |
| siRNA 3295 | 3295 | AAAAGAGUUUACAGAUUAU | 8785 | AUAAUCUGUAAACUCUUUU |
| siRNA 3296 | 3296 | AAAGAGUUUACAGAUUAUU | 8786 | AAUAAUCUGUAAACUCUUU |
| siRNA 3297 | 3297 | AAGAGUUUACAGAUUAUUU | 8787 | AAAUAAUCUGUAAACUCUU |
| siRNA 3298 | 3298 | AGAGUUUACAGAUUAUUUG | 8788 | CAAAUAAUCUGUAAACUCU |
| siRNA 3299 | 3299 | GAGUUUACAGAUUAUUUGU | 8789 | ACAAAUAAUCUGUAAACUC |
| siRNA 3300 | 3300 | AGUUUACAGAUUAUUUGUU | 8790 | AACAAAUAAUCUGUAAACU |
| siRNA 3301 | 3301 | GUUUACAGAUUAUUUGUUC | 8791 | GAACAAAUAAUCUGUAAAC |
| siRNA 3302 | 3302 | UUUACAGAUUAUUUGUUCA | 8792 | UGAACAAAUAAUCUGUAAA |
| siRNA 3303 | 3303 | UUACAGAUUAUUUGUUCAA | 8793 | UUGAACAAAUAAUCUGUAA |
| siRNA 3304 | 3304 | UACAGAUUAUUUGUUCAAC | 8794 | GUUGAACAAAUAAUCUGUA |
| siRNA 3305 | 3305 | ACAGAUUAUUUGUUCAACA | 8795 | UGUUGAACAAAUAAUCUGU |
| siRNA 3306 | 3306 | CAGAUUAUUUGUUCAACAA | 8796 | UUGUUGAACAAAUAAUCUG |
| siRNA 3307 | 3307 | AGAUUAUUUGUUCAACAAG | 8797 | CUUGUUGAACAAAUAAUCU |
| siRNA 3308 | 3308 | GAUUAUUUGUUCAACAAGU | 8798 | ACUUGUUGAACAAAUAAUC |
| siRNA 3309 | 3309 | AUUAUUUGUUCAACAAGUC | 8799 | GACUUGUUGAACAAAUAAU |
| siRNA 3310 | 3310 | UUAUUUGUUCAACAAGUCA | 8800 | UGACUUGUUGAACAAAUAA |
| siRNA 3311 | 3311 | UAUUUGUUCAACAAGUCAC | 8801 | GUGACUUGUUGAACAAAUA |
| siRNA 3312 | 3312 | AUUUGUUCAACAAGUCACU | 8802 | AGUGACUUGUUGAACAAAU |
| siRNA 3313 | 3313 | UUUGUUCAACAAGUCACUA | 8803 | UAGUGACUUGUUGAACAAA |
| siRNA 3314 | 3314 | UUGUUCAACAAGUCACUAG | 8804 | CUAGUGACUUGUUGAACAA |
| siRNA 3315 | 3315 | UGUUCAACAAGUCACUAGA | 8805 | UCUAGUGACUUGUUGAACA |
| siRNA 3316 | 3316 | GUUCAACAAGUCACUAGAA | 8806 | UUCUAGUGACUUGUUGAAC |
| siRNA 3317 | 3317 | UUCAACAAGUCACUAGAAA | 8807 | UUUCUAGUGACUUGUUGAA |
| siRNA 3318 | 3318 | UCAACAAGUCACUAGAAAU | 8808 | AUUUCUAGUGACUUGUUGA |
| siRNA 3319 | 3319 | CAACAAGUCACUAGAAAUU | 8809 | AAUUUCUAGUGACUUGUUG |
| siRNA 3320 | 3320 | AACAAGUCACUAGAAAUUG | 8810 | CAAUUUCUAGUGACUUGUU |
| siRNA 3321 | 3321 | ACAAGUCACUAGAAAUUGA | 8811 | UCAAUUUCUAGUGACUUGU |
| siRNA 3322 | 3322 | CAAGUCACUAGAAAUUGAA | 8812 | UUCAAUUUCUAGUGACUUG |
| siRNA 3323 | 3323 | AAGUCACUAGAAAUUGAAC | 8813 | GUUCAAUUUCUAGUGACUU |
| siRNA 3324 | 3324 | AGUCACUAGAAAUUGAACC | 8814 | GGUUCAAUUUCUAGUGACU |
| siRNA 3325 | 3325 | GUCACUAGAAAUUGAACCU | 8815 | AGGUUCAAUUUCUAGUGAC |
| siRNA 3326 | 3326 | UCACUAGAAAUUGAACCUC | 8816 | GAGGUUCAAUUUCUAGUGA |
| siRNA 3327 | 3327 | CACUAGAAAUUGAACCUCG | 8817 | CGAGGUUCAAUUUCUAGUG |
| siRNA 3328 | 3328 | ACUAGAAAUUGAACCUCGA | 8818 | UCGAGGUUCAAUUUCUAGU |
| siRNA 3329 | 3329 | CUAGAAAUUGAACCUCGAA | 8819 | UUCGAGGUUCAAUUUCUAG |
| siRNA 3330 | 3330 | UAGAAAUUGAACCUCGAAA | 8820 | UUUCGAGGUUCAAUUUCUA |
| siRNA 3331 | 3331 | AGAAAUUGAACCUCGAAAC | 8821 | GUUUCGAGGUUCAAUUUCU |
| siRNA 3332 | 3332 | GAAAUUGAACCUCGAAACU | 8822 | AGUUUCGAGGUUCAAUUUC |
| siRNA 3333 | 3333 | AAAUUGAACCUCGAAACUG | 8823 | CAGUUUCGAGGUUCAAUUU |
| siRNA 3334 | 3334 | AAUUGAACCUCGAAACUGC | 8824 | GCAGUUUCGAGGUUCAAUU |
| siRNA 3335 | 3335 | AUUGAACCUCGAAACUGCA | 8825 | UGCAGUUUCGAGGUUCAAU |
| siRNA 3336 | 3336 | UUGAACCUCGAAACUGCAA | 8826 | UUGCAGUUUCGAGGUUCAA |
| siRNA 3337 | 3337 | UGAACCUCGAAACUGCAAA | 8827 | UUUGCAGUUUCGAGGUUCA |
| siRNA 3338 | 3338 | GAACCUCGAAACUGCAAAC | 8828 | GUUUGCAGUUUCGAGGUUC |
| siRNA 3339 | 3339 | AACCUCGAAACUGCAAACA | 8829 | UGUUUGCAGUUUCGAGGUU |
| siRNA 3340 | 3340 | ACCUCGAAACUGCAAACAG | 8830 | CUGUUUGCAGUUUCGAGGU |
| siRNA 3341 | 3341 | CCUCGAAACUGCAAACAGC | 8831 | GCUGUUUGCAGUUUCGAGG |
| siRNA 3342 | 3342 | CUCGAAACUGCAAACAGCC | 8832 | GGCUGUUUGCAGUUUCGAG |
| siRNA 3343 | 3343 | UCGAAACUGCAAACAGCCA | 8833 | UGGCUGUUUGCAGUUUCGA |
| siRNA 3344 | 3344 | CGAAACUGCAAACAGCCAC | 8834 | GUGGCUGUUUGCAGUUUCG |
| siRNA 3345 | 3345 | GAAACUGCAAACAGCCACC | 8835 | GGUGGCUGUUUGCAGUUUC |
| siRNA 3346 | 3346 | AAACUGCAAACAGCCACCU | 8836 | AGGUGGCUGUUUGCAGUUU |
| siRNA 3347 | 3347 | AACUGCAAACAGCCACCUC | 8837 | GAGGUGGCUGUUUGCAGUU |
| siRNA 3348 | 3348 | ACUGCAAACAGCCACCUCG | 8838 | CGAGGUGGCUGUUUGCAGU |
| siRNA 3349 | 3349 | CUGCAAACAGCCACCUCGA | 8839 | UCGAGGUGGCUGUUUGCAG |
| siRNA 3350 | 3350 | UGCAAACAGCCACCUCGAU | 8840 | AUCGAGGUGGCUGUUUGCA |
| siRNA 3351 | 3351 | GCAAACAGCCACCUCGAUU | 8841 | AAUCGAGGUGGCUGUUUGC |
| siRNA 3352 | 3352 | CAAACAGCCACCUCGAUUU | 8842 | AAAUCGAGGUGGCUGUUUG |
| siRNA 3353 | 3353 | AAACAGCCACCUCGAUUUC | 8843 | GAAAUCGAGGUGGCUGUUU |
| siRNA 3354 | 3354 | AACAGCCACCUCGAUUUCC | 8844 | GGAAAUCGAGGUGGCUGUU |
| siRNA 3355 | 3355 | ACAGCCACCUCGAUUUCCU | 8845 | AGGAAAUCGAGGUGGCUGU |
| siRNA 3356 | 3356 | CAGCCACCUCGAUUUCCUA | 8846 | UAGGAAAUCGAGGUGGCUG |
| siRNA 3357 | 3357 | AGCCACCUCGAUUUCCUAG | 8847 | CUAGGAAAUCGAGGUGGCU |
| siRNA 3358 | 3358 | GCCACCUCGAUUUCCUAGG | 8848 | CCUAGGAAAUCGAGGUGGC |
| siRNA 3359 | 3359 | CCACCUCGAUUUCCUAGGA | 8849 | UCCUAGGAAAUCGAGGUGG |
| siRNA 3360 | 3360 | CACCUCGAUUUCCUAGGAA | 8850 | UUCCUAGGAAAUCGAGGUG |
| siRNA 3361 | 3361 | ACCUCGAUUUCCUAGGAAA | 8851 | UUUCCUAGGAAAUCGAGGU |
| siRNA 3362 | 3362 | CCUCGAUUUCCUAGGAAAU | 8852 | AUUUCCUAGGAAAUCGAGG |
| siRNA 3363 | 3363 | CUCGAUUUCCUAGGAAAUC | 8853 | GAUUUCCUAGGAAAUCGAG |
| siRNA 3364 | 3364 | UCGAUUUCCUAGGAAAUCA | 8854 | UGAUUUCCUAGGAAAUCGA |
| siRNA 3365 | 3365 | CGAUUUCCUAGGAAAUCAA | 8855 | UUGAUUUCCUAGGAAAUCG |
| siRNA 3366 | 3366 | GAUUUCCUAGGAAAUCAAC | 8856 | GUUGAUUUCCUAGGAAAUC |
| siRNA 3367 | 3367 | AUUUCCUAGGAAAUCAACU | 8857 | AGUUGAUUUCCUAGGAAAU |
| siRNA 3368 | 3368 | UUUCCUAGGAAAUCAACUU | 8858 | AAGUUGAUUUCCUAGGAAA |
| siRNA 3369 | 3369 | UUCCUAGGAAAUCAACUUU | 8859 | AAAGUUGAUUUCCUAGGAA |
| siRNA 3370 | 3370 | UCCUAGGAAAUCAACUUUU | 8860 | AAAAGUUGAUUUCCUAGGA |
| siRNA 3371 | 3371 | CCUAGGAAAUCAACUUUUU | 8861 | AAAAAGUUGAUUUCCUAGG |
| siRNA 3372 | 3372 | CUAGGAAAUCAACUUUUUC | 8862 | GAAAAAGUUGAUUUCCUAG |
| siRNA 3373 | 3373 | UAGGAAAUCAACUUUUUCC | 8863 | GGAAAAAGUUGAUUUCCUA |
| siRNA 3374 | 3374 | AGGAAAUCAACUUUUUCCU | 8864 | AGGAAAAAGUUGAUUUCCU |
| siRNA 3375 | 3375 | GGAAAUCAACUUUUUCCUU | 8865 | AAGGAAAAAGUUGAUUUCC |
| siRNA 3376 | 3376 | GAAAUCAACUUUUUCCUUA | 8866 | UAAGGAAAAAGUUGAUUUC |
| siRNA 3377 | 3377 | AAAUCAACUUUUUCCUUAA | 8867 | UUAAGGAAAAAGUUGAUUU |
| siRNA 3378 | 3378 | AAUCAACUUUUUCCUUAAA | 8868 | UUUAAGGAAAAAGUUGAUU |
| siRNA 3379 | 3379 | AUCAACUUUUUCCUUAAAA | 8869 | UUUUAAGGAAAAAGUUGAU |
| siRNA 3380 | 3380 | UCAACUUUUUCCUUAAAAU | 8870 | AUUUUAAGGAAAAAGUUGA |
| siRNA 3381 | 3381 | CAACUUUUUCCUUAAAAUC | 8871 | GAUUUUAAGGAAAAAGUUG |
| siRNA 3382 | 3382 | AACUUUUUCCUUAAAAUCU | 8872 | AGAUUUUAAGGAAAAAGUU |
| siRNA 3383 | 3383 | ACUUUUUCCUUAAAAUCUC | 8873 | GAGAUUUUAAGGAAAAAGU |
| siRNA 3384 | 3384 | CUUUUUCCUUAAAAUCUCC | 8874 | GGAGAUUUUAAGGAAAAAG |
| siRNA 3385 | 3385 | UUUUUCCUUAAAAUCUCCU | 8875 | AGGAGAUUUUAAGGAAAAA |
| siRNA 3386 | 3386 | UUUUCCUUAAAAUCUCCUG | 8876 | CAGGAGAUUUUAAGGAAAA |
| siRNA 3387 | 3387 | UUUCCUUAAAAUCUCCUGG | 8877 | CCAGGAGAUUUUAAGGAAA |
| siRNA 3388 | 3388 | UUCCUUAAAAUCUCCUGGA | 8878 | UCCAGGAGAUUUUAAGGAA |
| siRNA 3389 | 3389 | UCCUUAAAAUCUCCUGGAA | 8879 | UUCCAGGAGAUUUUAAGGA |
| siRNA 3390 | 3390 | CCUUAAAAUCUCCUGGAAU | 8880 | AUUCCAGGAGAUUUUAAGG |
| siRNA 3391 | 3391 | CUUAAAAUCUCCUGGAAUA | 8881 | UAUUCCAGGAGAUUUUAAG |
| siRNA 3392 | 3392 | UUAAAAUCUCCUGGAAUAA | 8882 | UUAUUCCAGGAGAUUUUAA |
| siRNA 3393 | 3393 | UAAAAUCUCCUGGAAUAAG | 8883 | CUUAUUCCAGGAGAUUUUA |
| siRNA 3394 | 3394 | AAAAUCUCCUGGAAUAAGG | 8884 | CCUUAUUCCAGGAGAUUUU |
| siRNA 3395 | 3395 | AAAUCUCCUGGAAUAAGGC | 8885 | GCCUUAUUCCAGGAGAUUU |
| siRNA 3396 | 3396 | AAUCUCCUGGAAUAAGGCC | 8886 | GGCCUUAUUCCAGGAGAUU |
| siRNA 3397 | 3397 | AUCUCCUGGAAUAAGGCCU | 8887 | AGGCCUUAUUCCAGGAGAU |
| siRNA 3398 | 3398 | UCUCCUGGAAUAAGGCCUA | 8888 | UAGGCCUUAUUCCAGGAGA |
| siRNA 3399 | 3399 | CUCCUGGAAUAAGGCCUAA | 8889 | UUAGGCCUUAUUCCAGGAG |
| siRNA 3400 | 3400 | UCCUGGAAUAAGGCCUAAC | 8890 | GUUAGGCCUUAUUCCAGGA |
| siRNA 3401 | 3401 | CCUGGAAUAAGGCCUAACA | 8891 | UGUUAGGCCUUAUUCCAGG |
| siRNA 3402 | 3402 | CUGGAAUAAGGCCUAACAC | 8892 | GUGUUAGGCCUUAUUCCAG |
| siRNA 3403 | 3403 | UGGAAUAAGGCCUAACACA | 8893 | UGUGUUAGGCCUUAUUCCA |
| siRNA 3404 | 3404 | GGAAUAAGGCCUAACACAG | 8894 | CUGUGUUAGGCCUUAUUCC |
| siRNA 3405 | 3405 | GAAUAAGGCCUAACACAGG | 8895 | CCUGUGUUAGGCCUUAUUC |
| siRNA 3406 | 3406 | AAUAAGGCCUAACACAGGC | 8896 | GCCUGUGUUAGGCCUUAUU |
| siRNA 3407 | 3407 | AUAAGGCCUAACACAGGCC | 8897 | GGCCUGUGUUAGGCCUUAU |
| siRNA 3408 | 3408 | UAAGGCCUAACACAGGCCG | 8898 | CGGCCUGUGUUAGGCCUUA |
| siRNA 3409 | 3409 | AAGGCCUAACACAGGCCGA | 8899 | UCGGCCUGUGUUAGGCCUU |
| siRNA 3410 | 3410 | AGGCCUAACACAGGCCGAC | 8900 | GUCGGCCUGUGUUAGGCCU |
| siRNA 3411 | 3411 | GGCCUAACACAGGCCGACA | 8901 | UGUCGGCCUGUGUUAGGCC |
| siRNA 3412 | 3412 | GCCUAACACAGGCCGACAU | 8902 | AUGUCGGCCUGUGUUAGGC |
| siRNA 3413 | 3413 | CCUAACACAGGCCGACAUG | 8903 | CAUGUCGGCCUGUGUUAGG |
| siRNA 3414 | 3414 | CUAACACAGGCCGACAUGG | 8904 | CCAUGUCGGCCUGUGUUAG |
| siRNA 3415 | 3415 | UAACACAGGCCGACAUGGC | 8905 | GCCAUGUCGGCCUGUGUUA |
| siRNA 3416 | 3416 | AACACAGGCCGACAUGGCU | 8906 | AGCCAUGUCGGCCUGUGUU |
| siRNA 3417 | 3417 | ACACAGGCCGACAUGGCUC | 8907 | GAGCCAUGUCGGCCUGUGU |
| siRNA 3418 | 3418 | CACAGGCCGACAUGGCUCU | 8908 | AGAGCCAUGUCGGCCUGUG |
| siRNA 3419 | 3419 | ACAGGCCGACAUGGCUCUA | 8909 | UAGAGCCAUGUCGGCCUGU |
| siRNA 3420 | 3420 | CAGGCCGACAUGGCUCUAC | 8910 | GUAGAGCCAUGUCGGCCUG |
| siRNA 3421 | 3421 | AGGCCGACAUGGCUCUACC | 8911 | GGUAGAGCCAUGUCGGCCU |
| siRNA 3422 | 3422 | GGCCGACAUGGCUCUACCU | 8912 | AGGUAGAGCCAUGUCGGCC |
| siRNA 3423 | 3423 | GCCGACAUGGCUCUACCUC | 8913 | GAGGUAGAGCCAUGUCGGC |
| siRNA 3424 | 3424 | CCGACAUGGCUCUACCUCA | 8914 | UGAGGUAGAGCCAUGUCGG |
| siRNA 3425 | 3425 | CGACAUGGCUCUACCUCAG | 8915 | CUGAGGUAGAGCCAUGUCG |
| siRNA 3426 | 3426 | GACAUGGCUCUACCUCAGG | 8916 | CCUGAGGUAGAGCCAUGUC |
| siRNA 3427 | 3427 | ACAUGGCUCUACCUCAGGU | 8917 | ACCUGAGGUAGAGCCAUGU |
| siRNA 3428 | 3428 | CAUGGCUCUACCUCAGGUA | 8918 | UACCUGAGGUAGAGCCAUG |
| siRNA 3429 | 3429 | AUGGCUCUACCUCAGGUAC | 8919 | GUACCUGAGGUAGAGCCAU |
| siRNA 3430 | 3430 | UGGCUCUACCUCAGGUACU | 8920 | AGUACCUGAGGUAGAGCCA |
| siRNA 3431 | 3431 | GGCUCUACCUCAGGUACUU | 8921 | AAGUACCUGAGGUAGAGCC |
| siRNA 3432 | 3432 | GCUCUACCUCAGGUACUUU | 8922 | AAAGUACCUGAGGUAGAGC |
| siRNA 3433 | 3433 | CUCUACCUCAGGUACUUUA | 8923 | UAAAGUACCUGAGGUAGAG |
| siRNA 3434 | 3434 | UCUACCUCAGGUACUUUAC | 8924 | GUAAAGUACCUGAGGUAGA |
| siRNA 3435 | 3435 | CUACCUCAGGUACUUUACG | 8925 | CGUAAAGUACCUGAGGUAG |
| siRNA 3436 | 3436 | UACCUCAGGUACUUUACGA | 8926 | UCGUAAAGUACCUGAGGUA |
| siRNA 3437 | 3437 | ACCUCAGGUACUUUACGAG | 8927 | CUCGUAAAGUACCUGAGGU |
| siRNA 3438 | 3438 | CCUCAGGUACUUUACGAGG | 8928 | CCUCGUAAAGUACCUGAGG |
| siRNA 3439 | 3439 | CUCAGGUACUUUACGAGGU | 8929 | ACCUCGUAAAGUACCUGAG |
| siRNA 3440 | 3440 | UCAGGUACUUUACGAGGUC | 8930 | GACCUCGUAAAGUACCUGA |
| siRNA 3441 | 3441 | CAGGUACUUUACGAGGUCA | 8931 | UGACCUCGUAAAGUACCUG |
| siRNA 3442 | 3442 | AGGUACUUUACGAGGUCAC | 8932 | GUGACCUCGUAAAGUACCU |
| siRNA 3443 | 3443 | GGUACUUUACGAGGUCACC | 8933 | GGUGACCUCGUAAAGUACC |
| siRNA 3444 | 3444 | GUACUUUACGAGGUCACCC | 8934 | GGGUGACCUCGUAAAGUAC |
| siRNA 3445 | 3445 | UACUUUACGAGGUCACCCA | 8935 | UGGGUGACCUCGUAAAGUA |
| siRNA 3446 | 3446 | ACUUUACGAGGUCACCCAA | 8936 | UUGGGUGACCUCGUAAAGU |
| siRNA 3447 | 3447 | CUUUACGAGGUCACCCAAC | 8937 | GUUGGGUGACCUCGUAAAG |
| siRNA 3448 | 3448 | UUUACGAGGUCACCCAACA | 8938 | UGUUGGGUGACCUCGUAAA |
| siRNA 3449 | 3449 | UUACGAGGUCACCCAACAC | 8939 | GUGUUGGGUGACCUCGUAA |
| siRNA 3450 | 3450 | UACGAGGUCACCCAACACC | 8940 | GGUGUUGGGUGACCUCGUA |
| siRNA 3451 | 3451 | ACGAGGUCACCCAACACCA | 8941 | UGGUGUUGGGUGACCUCGU |
| siRNA 3452 | 3452 | CGAGGUCACCCAACACCAU | 8942 | AUGGUGUUGGGUGACCUCG |
| siRNA 3453 | 3453 | GAGGUCACCCAACACCAUU | 8943 | AAUGGUGUUGGGUGACCUC |
| siRNA 3454 | 3454 | AGGUCACCCAACACCAUUA | 8944 | UAAUGGUGUUGGGUGACCU |
| siRNA 3455 | 3455 | GGUCACCCAACACCAUUAG | 8945 | CUAAUGGUGUUGGGUGACC |
| siRNA 3456 | 3456 | GUCACCCAACACCAUUAGA | 8946 | UCUAAUGGUGUUGGGUGAC |
| siRNA 3457 | 3457 | UCACCCAACACCAUUAGAA | 8947 | UUCUAAUGGUGUUGGGUGA |
| siRNA 3458 | 3458 | CACCCAACACCAUUAGAAA | 8948 | UUUCUAAUGGUGUUGGGUG |
| siRNA 3459 | 3459 | ACCCAACACCAUUAGAAAG | 8949 | CUUUCUAAUGGUGUUGGGU |
| siRNA 3460 | 3460 | CCCAACACCAUUAGAAAGA | 8950 | UCUUUCUAAUGGUGUUGGG |
| siRNA 3461 | 3461 | CCAACACCAUUAGAAAGAG | 8951 | CUCUUUCUAAUGGUGUUGG |
| siRNA 3462 | 3462 | CAACACCAUUAGAAAGAGA | 8952 | UCUCUUUCUAAUGGUGUUG |
| siRNA 3463 | 3463 | AACACCAUUAGAAAGAGAA | 8953 | UUCUCUUUCUAAUGGUGUU |
| siRNA 3464 | 3464 | ACACCAUUAGAAAGAGAAC | 8954 | GUUCUCUUUCUAAUGGUGU |
| siRNA 3465 | 3465 | CACCAUUAGAAAGAGAACC | 8955 | GGUUCUCUUUCUAAUGGUG |
| siRNA 3466 | 3466 | ACCAUUAGAAAGAGAACCA | 8956 | UGGUUCUCUUUCUAAUGGU |
| siRNA 3467 | 3467 | CCAUUAGAAAGAGAACCAU | 8957 | AUGGUUCUCUUUCUAAUGG |
| siRNA 3468 | 3468 | CAUUAGAAAGAGAACCAUG | 8958 | CAUGGUUCUCUUUCUAAUG |
| siRNA 3469 | 3469 | AUUAGAAAGAGAACCAUGU | 8959 | ACAUGGUUCUCUUUCUAAU |
| siRNA 3470 | 3470 | UUAGAAAGAGAACCAUGUA | 8960 | UACAUGGUUCUCUUUCUAA |
| siRNA 3471 | 3471 | UAGAAAGAGAACCAUGUAA | 8961 | UUACAUGGUUCUCUUUCUA |
| siRNA 3472 | 3472 | AGAAAGAGAACCAUGUAAA | 8962 | UUUACAUGGUUCUCUUUCU |
| siRNA 3473 | 3473 | GAAAGAGAACCAUGUAAAA | 8963 | UUUUACAUGGUUCUCUUUC |
| siRNA 3474 | 3474 | AAAGAGAACCAUGUAAAAU | 8964 | AUUUUACAUGGUUCUCUUU |
| siRNA 3475 | 3475 | AAGAGAACCAUGUAAAAUA | 8965 | UAUUUUACAUGGUUCUCUU |
| siRNA 3476 | 3476 | AGAGAACCAUGUAAAAUAA | 8966 | UUAUUUUACAUGGUUCUCU |
| siRNA 3477 | 3477 | GAGAACCAUGUAAAAUAAG | 8967 | CUUAUUUUACAUGGUUCUC |
| siRNA 3478 | 3478 | AGAACCAUGUAAAAUAAGC | 8968 | GCUUAUUUUACAUGGUUCU |
| siRNA 3479 | 3479 | GAACCAUGUAAAAUAAGCU | 8969 | AGCUUAUUUUACAUGGUUC |
| siRNA 3480 | 3480 | AACCAUGUAAAAUAAGCUU | 8970 | AAGCUUAUUUUACAUGGUU |
| siRNA 3481 | 3481 | ACCAUGUAAAAUAAGCUUU | 8971 | AAAGCUUAUUUUACAUGGU |
| siRNA 3482 | 3482 | CCAUGUAAAAUAAGCUUUA | 8972 | UAAAGCUUAUUUUACAUGG |
| siRNA 3483 | 3483 | CAUGUAAAAUAAGCUUUAG | 8973 | CUAAAGCUUAUUUUACAUG |
| siRNA 3484 | 3484 | AUGUAAAAUAAGCUUUAGU | 8974 | ACUAAAGCUUAUUUUACAU |
| siRNA 3485 | 3485 | UGUAAAAUAAGCUUUAGUC | 8975 | GACUAAAGCUUAUUUUACA |
| siRNA 3486 | 3486 | GUAAAAUAAGCUUUAGUCG | 8976 | CGACUAAAGCUUAUUUUAC |
| siRNA 3487 | 3487 | UAAAAUAAGCUUUAGUCGG | 8977 | CCGACUAAAGCUUAUUUUA |
| siRNA 3488 | 3488 | AAAAUAAGCUUUAGUCGGA | 8978 | UCCGACUAAAGCUUAUUUU |
| siRNA 3489 | 3489 | AAAUAAGCUUUAGUCGGAU | 8979 | AUCCGACUAAAGCUUAUUU |
| siRNA 3490 | 3490 | AAUAAGCUUUAGUCGGAUU | 8980 | AAUCCGACUAAAGCUUAUU |
| siRNA 3491 | 3491 | AUAAGCUUUAGUCGGAUUG | 8981 | CAAUCCGACUAAAGCUUAU |
| siRNA 3492 | 3492 | UAAGCUUUAGUCGGAUUGC | 8982 | GCAAUCCGACUAAAGCUUA |
| siRNA 3493 | 3493 | AAGCUUUAGUCGGAUUGCU | 8983 | AGCAAUCCGACUAAAGCUU |
| siRNA 3494 | 3494 | AGCUUUAGUCGGAUUGCUG | 8984 | CAGCAAUCCGACUAAAGCU |
| siRNA 3495 | 3495 | GCUUUAGUCGGAUUGCUGA | 8985 | UCAGCAAUCCGACUAAAGC |
| siRNA 3496 | 3496 | CUUUAGUCGGAUUGCUGAA | 8986 | UUCAGCAAUCCGACUAAAG |
| siRNA 3497 | 3497 | UUUAGUCGGAUUGCUGAAA | 8987 | UUUCAGCAAUCCGACUAAA |
| siRNA 3498 | 3498 | UUAGUCGGAUUGCUGAAAC | 8988 | GUUUCAGCAAUCCGACUAA |
| siRNA 3499 | 3499 | UAGUCGGAUUGCUGAAACU | 8989 | AGUUUCAGCAAUCCGACUA |
| siRNA 3500 | 3500 | AGUCGGAUUGCUGAAACUG | 8990 | CAGUUUCAGCAAUCCGACU |
| siRNA 3501 | 3501 | GUCGGAUUGCUGAAACUGA | 8991 | UCAGUUUCAGCAAUCCGAC |
| siRNA 3502 | 3502 | UCGGAUUGCUGAAACUGAG | 8992 | CUCAGUUUCAGCAAUCCGA |
| siRNA 3503 | 3503 | CGGAUUGCUGAAACUGAGC | 8993 | GCUCAGUUUCAGCAAUCCG |
| siRNA 3504 | 3504 | GGAUUGCUGAAACUGAGCU | 8994 | AGCUCAGUUUCAGCAAUCC |
| siRNA 3505 | 3505 | GAUUGCUGAAACUGAGCUG | 8995 | CAGCUCAGUUUCAGCAAUC |
| siRNA 3506 | 3506 | AUUGCUGAAACUGAGCUGG | 8996 | CCAGCUCAGUUUCAGCAAU |
| siRNA 3507 | 3507 | UUGCUGAAACUGAGCUGGA | 8997 | UCCAGCUCAGUUUCAGCAA |
| siRNA 3508 | 3508 | UGCUGAAACUGAGCUGGAA | 8998 | UUCCAGCUCAGUUUCAGCA |
| siRNA 3509 | 3509 | GCUGAAACUGAGCUGGAAU | 8999 | AUUCCAGCUCAGUUUCAGC |
| siRNA 3510 | 3510 | CUGAAACUGAGCUGGAAUC | 9000 | GAUUCCAGCUCAGUUUCAG |
| siRNA 3511 | 3511 | UGAAACUGAGCUGGAAUCA | 9001 | UGAUUCCAGCUCAGUUUCA |
| siRNA 3512 | 3512 | GAAACUGAGCUGGAAUCAA | 9002 | UUGAUUCCAGCUCAGUUUC |
| siRNA 3513 | 3513 | AAACUGAGCUGGAAUCAAC | 9003 | GUUGAUUCCAGCUCAGUUU |
| siRNA 3514 | 3514 | AACUGAGCUGGAAUCAACA | 9004 | UGUUGAUUCCAGCUCAGUU |
| siRNA 3515 | 3515 | ACUGAGCUGGAAUCAACAG | 9005 | CUGUUGAUUCCAGCUCAGU |
| siRNA 3516 | 3516 | CUGAGCUGGAAUCAACAGU | 9006 | ACUGUUGAUUCCAGCUCAG |
| siRNA 3517 | 3517 | UGAGCUGGAAUCAACAGUG | 9007 | CACUGUUGAUUCCAGCUCA |
| siRNA 3518 | 3518 | GAGCUGGAAUCAACAGUGU | 9008 | ACACUGUUGAUUCCAGCUC |
| siRNA 3519 | 3519 | AGCUGGAAUCAACAGUGUC | 9009 | GACACUGUUGAUUCCAGCU |
| siRNA 3520 | 3520 | GCUGGAAUCAACAGUGUCA | 9010 | UGACACUGUUGAUUCCAGC |
| siRNA 3521 | 3521 | CUGGAAUCAACAGUGUCAG | 9011 | CUGACACUGUUGAUUCCAG |
| siRNA 3522 | 3522 | UGGAAUCAACAGUGUCAGC | 9012 | GCUGACACUGUUGAUUCCA |
| siRNA 3523 | 3523 | GGAAUCAACAGUGUCAGCA | 9013 | UGCUGACACUGUUGAUUCC |
| siRNA 3524 | 3524 | GAAUCAACAGUGUCAGCAC | 9014 | GUGCUGACACUGUUGAUUC |
| siRNA 3525 | 3525 | AAUCAACAGUGUCAGCACC | 9015 | GGUGCUGACACUGUUGAUU |
| siRNA 3526 | 3526 | AUCAACAGUGUCAGCACCA | 9016 | UGGUGCUGACACUGUUGAU |
| siRNA 3527 | 3527 | UCAACAGUGUCAGCACCAA | 9017 | UUGGUGCUGACACUGUUGA |
| siRNA 3528 | 3528 | CAACAGUGUCAGCACCAAC | 9018 | GUUGGUGCUGACACUGUUG |
| siRNA 3529 | 3529 | AACAGUGUCAGCACCAACC | 9019 | GGUUGGUGCUGACACUGUU |
| siRNA 3530 | 3530 | ACAGUGUCAGCACCAACCU | 9020 | AGGUUGGUGCUGACACUGU |
| siRNA 3531 | 3531 | CAGUGUCAGCACCAACCUC | 9021 | GAGGUUGGUGCUGACACUG |
| siRNA 3532 | 3532 | AGUGUCAGCACCAACCUCU | 9022 | AGAGGUUGGUGCUGACACU |
| siRNA 3533 | 3533 | GUGUCAGCACCAACCUCUC | 9023 | GAGAGGUUGGUGCUGACAC |
| siRNA 3534 | 3534 | UGUCAGCACCAACCUCUCC | 9024 | GGAGAGGUUGGUGCUGACA |
| siRNA 3535 | 3535 | GUCAGCACCAACCUCUCCA | 9025 | UGGAGAGGUUGGUGCUGAC |
| siRNA 3536 | 3536 | UCAGCACCAACCUCUCCAA | 9026 | UUGGAGAGGUUGGUGCUGA |
| siRNA 3537 | 3537 | CAGCACCAACCUCUCCAAA | 9027 | UUUGGAGAGGUUGGUGCUG |
| siRNA 3538 | 3538 | AGCACCAACCUCUCCAAAU | 9028 | AUUUGGAGAGGUUGGUGCU |
| siRNA 3539 | 3539 | GCACCAACCUCUCCAAAUA | 9029 | UAUUUGGAGAGGUUGGUGC |
| siRNA 3540 | 3540 | CACCAACCUCUCCAAAUAC | 9030 | GUAUUUGGAGAGGUUGGUG |
| siRNA 3541 | 3541 | ACCAACCUCUCCAAAUACA | 9031 | UGUAUUUGGAGAGGUUGGU |
| siRNA 3542 | 3542 | CCAACCUCUCCAAAUACAC | 9032 | GUGUAUUUGGAGAGGUUGG |
| siRNA 3543 | 3543 | CAACCUCUCCAAAUACACC | 9033 | GGUGUAUUUGGAGAGGUUG |
| siRNA 3544 | 3544 | AACCUCUCCAAAUACACCA | 9034 | UGGUGUAUUUGGAGAGGUU |
| siRNA 3545 | 3545 | ACCUCUCCAAAUACACCAU | 9035 | AUGGUGUAUUUGGAGAGGU |
| siRNA 3546 | 3546 | CCUCUCCAAAUACACCAUC | 9036 | GAUGGUGUAUUUGGAGAGG |
| siRNA 3547 | 3547 | CUCUCCAAAUACACCAUCU | 9037 | AGAUGGUGUAUUUGGAGAG |
| siRNA 3548 | 3548 | UCUCCAAAUACACCAUCUA | 9038 | UAGAUGGUGUAUUUGGAGA |
| siRNA 3549 | 3549 | CUCCAAAUACACCAUCUAC | 9039 | GUAGAUGGUGUAUUUGGAG |
| siRNA 3550 | 3550 | UCCAAAUACACCAUCUACU | 9040 | AGUAGAUGGUGUAUUUGGA |
| siRNA 3551 | 3551 | CCAAAUACACCAUCUACUC | 9041 | GAGUAGAUGGUGUAUUUGG |
| siRNA 3552 | 3552 | CAAAUACACCAUCUACUCC | 9042 | GGAGUAGAUGGUGUAUUUG |
| siRNA 3553 | 3553 | AAAUACACCAUCUACUCCA | 9043 | UGGAGUAGAUGGUGUAUUU |
| siRNA 3554 | 3554 | AAUACACCAUCUACUCCAC | 9044 | GUGGAGUAGAUGGUGUAUU |
| siRNA 3555 | 3555 | AUACACCAUCUACUCCACC | 9045 | GGUGGAGUAGAUGGUGUAU |
| siRNA 3556 | 3556 | UACACCAUCUACUCCACCA | 9046 | UGGUGGAGUAGAUGGUGUA |
| siRNA 3557 | 3557 | ACACCAUCUACUCCACCAG | 9047 | CUGGUGGAGUAGAUGGUGU |
| siRNA 3558 | 3558 | CACCAUCUACUCCACCAGU | 9048 | ACUGGUGGAGUAGAUGGUG |
| siRNA 3559 | 3559 | ACCAUCUACUCCACCAGUA | 9049 | UACUGGUGGAGUAGAUGGU |
| siRNA 3560 | 3560 | CCAUCUACUCCACCAGUAU | 9050 | AUACUGGUGGAGUAGAUGG |
| siRNA 3561 | 3561 | CAUCUACUCCACCAGUAUC | 9051 | GAUACUGGUGGAGUAGAUG |
| siRNA 3562 | 3562 | AUCUACUCCACCAGUAUCU | 9052 | AGAUACUGGUGGAGUAGAU |
| siRNA 3563 | 3563 | UCUACUCCACCAGUAUCUG | 9053 | CAGAUACUGGUGGAGUAGA |
| siRNA 3564 | 3564 | CUACUCCACCAGUAUCUGC | 9054 | GCAGAUACUGGUGGAGUAG |
| siRNA 3565 | 3565 | UACUCCACCAGUAUCUGCU | 9055 | AGCAGAUACUGGUGGAGUA |
| siRNA 3566 | 3566 | ACUCCACCAGUAUCUGCUU | 9056 | AAGCAGAUACUGGUGGAGU |
| siRNA 3567 | 3567 | CUCCACCAGUAUCUGCUUC | 9057 | GAAGCAGAUACUGGUGGAG |
| siRNA 3568 | 3568 | UCCACCAGUAUCUGCUUCU | 9058 | AGAAGCAGAUACUGGUGGA |
| siRNA 3569 | 3569 | CCACCAGUAUCUGCUUCUU | 9059 | AAGAAGCAGAUACUGGUGG |
| siRNA 3570 | 3570 | CACCAGUAUCUGCUUCUUC | 9060 | GAAGAAGCAGAUACUGGUG |
| siRNA 3571 | 3571 | ACCAGUAUCUGCUUCUUCA | 9061 | UGAAGAAGCAGAUACUGGU |
| siRNA 3572 | 3572 | CCAGUAUCUGCUUCUUCAG | 9062 | CUGAAGAAGCAGAUACUGG |
| siRNA 3573 | 3573 | CAGUAUCUGCUUCUUCAGA | 9063 | UCUGAAGAAGCAGAUACUG |
| siRNA 3574 | 3574 | AGUAUCUGCUUCUUCAGAC | 9064 | GUCUGAAGAAGCAGAUACU |
| siRNA 3575 | 3575 | GUAUCUGCUUCUUCAGACC | 9065 | GGUCUGAAGAAGCAGAUAC |
| siRNA 3576 | 3576 | UAUCUGCUUCUUCAGACCU | 9066 | AGGUCUGAAGAAGCAGAUA |
| siRNA 3577 | 3577 | AUCUGCUUCUUCAGACCUU | 9067 | AAGGUCUGAAGAAGCAGAU |
| siRNA 3578 | 3578 | UCUGCUUCUUCAGACCUUA | 9068 | UAAGGUCUGAAGAAGCAGA |
| siRNA 3579 | 3579 | CUGCUUCUUCAGACCUUAG | 9069 | CUAAGGUCUGAAGAAGCAG |
| siRNA 3580 | 3580 | UGCUUCUUCAGACCUUAGU | 9070 | ACUAAGGUCUGAAGAAGCA |
| siRNA 3581 | 3581 | GCUUCUUCAGACCUUAGUG | 9071 | CACUAAGGUCUGAAGAAGC |
| siRNA 3582 | 3582 | CUUCUUCAGACCUUAGUGU | 9072 | ACACUAAGGUCUGAAGAAG |
| siRNA 3583 | 3583 | UUCUUCAGACCUUAGUGUA | 9073 | UACACUAAGGUCUGAAGAA |
| siRNA 3584 | 3584 | UCUUCAGACCUUAGUGUAU | 9074 | AUACACUAAGGUCUGAAGA |
| siRNA 3585 | 3585 | CUUCAGACCUUAGUGUAUU | 9075 | AAUACACUAAGGUCUGAAG |
| siRNA 3586 | 3586 | UUCAGACCUUAGUGUAUUU | 9076 | AAAUACACUAAGGUCUGAA |
| siRNA 3587 | 3587 | UCAGACCUUAGUGUAUUUU | 9077 | AAAAUACACUAAGGUCUGA |
| siRNA 3588 | 3588 | CAGACCUUAGUGUAUUUUU | 9078 | AAAAAUACACUAAGGUCUG |
| siRNA 3589 | 3589 | AGACCUUAGUGUAUUUUUA | 9079 | UAAAAAUACACUAAGGUCU |
| siRNA 3590 | 3590 | GACCUUAGUGUAUUUUUAG | 9080 | CUAAAAAUACACUAAGGUC |
| siRNA 3591 | 3591 | ACCUUAGUGUAUUUUUAGA | 9081 | UCUAAAAAUACACUAAGGU |
| siRNA 3592 | 3592 | CCUUAGUGUAUUUUUAGAU | 9082 | AUCUAAAAAUACACUAAGG |
| siRNA 3593 | 3593 | CUUAGUGUAUUUUUAGAUG | 9083 | CAUCUAAAAAUACACUAAG |
| siRNA 3594 | 3594 | UUAGUGUAUUUUUAGAUGU | 9084 | ACAUCUAAAAAUACACUAA |
| siRNA 3595 | 3595 | UAGUGUAUUUUUAGAUGUG | 9085 | CACAUCUAAAAAUACACUA |
| siRNA 3596 | 3596 | AGUGUAUUUUUAGAUGUGG | 9086 | CCACAUCUAAAAAUACACU |
| siRNA 3597 | 3597 | GUGUAUUUUUAGAUGUGGA | 9087 | UCCACAUCUAAAAAUACAC |
| siRNA 3598 | 3598 | UGUAUUUUUAGAUGUGGAU | 9088 | AUCCACAUCUAAAAAUACA |
| siRNA 3599 | 3599 | GUAUUUUUAGAUGUGGAUC | 9089 | GAUCCACAUCUAAAAAUAC |
| siRNA 3600 | 3600 | UAUUUUUAGAUGUGGAUCU | 9090 | AGAUCCACAUCUAAAAAUA |
| siRNA 3601 | 3601 | AUUUUUAGAUGUGGAUCUC | 9091 | GAGAUCCACAUCUAAAAAU |
| siRNA 3602 | 3602 | UUUUUAGAUGUGGAUCUCA | 9092 | UGAGAUCCACAUCUAAAAA |
| siRNA 3603 | 3603 | UUUUAGAUGUGGAUCUCAA | 9093 | UUGAGAUCCACAUCUAAAA |
| siRNA 3604 | 3604 | UUUAGAUGUGGAUCUCAAC | 9094 | GUUGAGAUCCACAUCUAAA |
| siRNA 3605 | 3605 | UUAGAUGUGGAUCUCAACA | 9095 | UGUUGAGAUCCACAUCUAA |
| siRNA 3606 | 3606 | UAGAUGUGGAUCUCAACAG | 9096 | CUGUUGAGAUCCACAUCUA |
| siRNA 3607 | 3607 | AGAUGUGGAUCUCAACAGC | 9097 | GCUGUUGAGAUCCACAUCU |
| siRNA 3608 | 3608 | GAUGUGGAUCUCAACAGCU | 9098 | AGCUGUUGAGAUCCACAUC |
| siRNA 3609 | 3609 | AUGUGGAUCUCAACAGCUC | 9099 | GAGCUGUUGAGAUCCACAU |
| siRNA 3610 | 3610 | UGUGGAUCUCAACAGCUCC | 9100 | GGAGCUGUUGAGAUCCACA |
| siRNA 3611 | 3611 | GUGGAUCUCAACAGCUCCU | 9101 | AGGAGCUGUUGAGAUCCAC |
| siRNA 3612 | 3612 | UGGAUCUCAACAGCUCCUG | 9102 | CAGGAGCUGUUGAGAUCCA |
| siRNA 3613 | 3613 | GGAUCUCAACAGCUCCUGU | 9103 | ACAGGAGCUGUUGAGAUCC |
| siRNA 3614 | 3614 | GAUCUCAACAGCUCCUGUG | 9104 | CACAGGAGCUGUUGAGAUC |
| siRNA 3615 | 3615 | AUCUCAACAGCUCCUGUGG | 9105 | CCACAGGAGCUGUUGAGAU |
| siRNA 3616 | 3616 | UCUCAACAGCUCCUGUGGC | 9106 | GCCACAGGAGCUGUUGAGA |
| siRNA 3617 | 3617 | CUCAACAGCUCCUGUGGCA | 9107 | UGCCACAGGAGCUGUUGAG |
| siRNA 3618 | 3618 | UCAACAGCUCCUGUGGCAG | 9108 | CUGCCACAGGAGCUGUUGA |
| siRNA 3619 | 3619 | CAACAGCUCCUGUGGCAGC | 9109 | GCUGCCACAGGAGCUGUUG |
| siRNA 3620 | 3620 | AACAGCUCCUGUGGCAGCA | 9110 | UGCUGCCACAGGAGCUGUU |
| siRNA 3621 | 3621 | ACAGCUCCUGUGGCAGCAA | 9111 | UUGCUGCCACAGGAGCUGU |
| siRNA 3622 | 3622 | CAGCUCCUGUGGCAGCAAU | 9112 | AUUGCUGCCACAGGAGCUG |
| siRNA 3623 | 3623 | AGCUCCUGUGGCAGCAAUA | 9113 | UAUUGCUGCCACAGGAGCU |
| siRNA 3624 | 3624 | GCUCCUGUGGCAGCAAUAG | 9114 | CUAUUGCUGCCACAGGAGC |
| siRNA 3625 | 3625 | CUCCUGUGGCAGCAAUAGC | 9115 | GCUAUUGCUGCCACAGGAG |
| siRNA 3626 | 3626 | UCCUGUGGCAGCAAUAGCA | 9116 | UGCUAUUGCUGCCACAGGA |
| siRNA 3627 | 3627 | CCUGUGGCAGCAAUAGCAU | 9117 | AUGCUAUUGCUGCCACAGG |
| siRNA 3628 | 3628 | CUGUGGCAGCAAUAGCAUC | 9118 | GAUGCUAUUGCUGCCACAG |
| siRNA 3629 | 3629 | UGUGGCAGCAAUAGCAUCU | 9119 | AGAUGCUAUUGCUGCCACA |
| siRNA 3630 | 3630 | GUGGCAGCAAUAGCAUCUU | 9120 | AAGAUGCUAUUGCUGCCAC |
| siRNA 3631 | 3631 | UGGCAGCAAUAGCAUCUUU | 9121 | AAAGAUGCUAUUGCUGCCA |
| siRNA 3632 | 3632 | GGCAGCAAUAGCAUCUUUG | 9122 | CAAAGAUGCUAUUGCUGCC |
| siRNA 3633 | 3633 | GCAGCAAUAGCAUCUUUGC | 9123 | GCAAAGAUGCUAUUGCUGC |
| siRNA 3634 | 3634 | CAGCAAUAGCAUCUUUGCU | 9124 | AGCAAAGAUGCUAUUGCUG |
| siRNA 3635 | 3635 | AGCAAUAGCAUCUUUGCUC | 9125 | GAGCAAAGAUGCUAUUGCU |
| siRNA 3636 | 3636 | GCAAUAGCAUCUUUGCUCC | 9126 | GGAGCAAAGAUGCUAUUGC |
| siRNA 3637 | 3637 | CAAUAGCAUCUUUGCUCCA | 9127 | UGGAGCAAAGAUGCUAUUG |
| siRNA 3638 | 3638 | AAUAGCAUCUUUGCUCCAG | 9128 | CUGGAGCAAAGAUGCUAUU |
| siRNA 3639 | 3639 | AUAGCAUCUUUGCUCCAGU | 9129 | ACUGGAGCAAAGAUGCUAU |
| siRNA 3640 | 3640 | UAGCAUCUUUGCUCCAGUG | 9130 | CACUGGAGCAAAGAUGCUA |
| siRNA 3641 | 3641 | AGCAUCUUUGCUCCAGUGC | 9131 | GCACUGGAGCAAAGAUGCU |
| siRNA 3642 | 3642 | GCAUCUUUGCUCCAGUGCU | 9132 | AGCACUGGAGCAAAGAUGC |
| siRNA 3643 | 3643 | CAUCUUUGCUCCAGUGCUU | 9133 | AAGCACUGGAGCAAAGAUG |
| siRNA 3644 | 3644 | AUCUUUGCUCCAGUGCUUU | 9134 | AAAGCACUGGAGCAAAGAU |
| siRNA 3645 | 3645 | UCUUUGCUCCAGUGCUUUU | 9135 | AAAAGCACUGGAGCAAAGA |
| siRNA 3646 | 3646 | CUUUGCUCCAGUGCUUUUG | 9136 | CAAAAGCACUGGAGCAAAG |
| siRNA 3647 | 3647 | UUUGCUCCAGUGCUUUUGC | 9137 | GCAAAAGCACUGGAGCAAA |
| siRNA 3648 | 3648 | UUGCUCCAGUGCUUUUGCC | 9138 | GGCAAAAGCACUGGAGCAA |
| siRNA 3649 | 3649 | UGCUCCAGUGCUUUUGCCA | 9139 | UGGCAAAAGCACUGGAGCA |
| siRNA 3650 | 3650 | GCUCCAGUGCUUUUGCCAC | 9140 | GUGGCAAAAGCACUGGAGC |
| siRNA 3651 | 3651 | CUCCAGUGCUUUUGCCACA | 9141 | UGUGGCAAAAGCACUGGAG |
| siRNA 3652 | 3652 | UCCAGUGCUUUUGCCACAU | 9142 | AUGUGGCAAAAGCACUGGA |
| siRNA 3653 | 3653 | CCAGUGCUUUUGCCACAUU | 9143 | AAUGUGGCAAAAGCACUGG |
| siRNA 3654 | 3654 | CAGUGCUUUUGCCACAUUC | 9144 | GAAUGUGGCAAAAGCACUG |
| siRNA 3655 | 3655 | AGUGCUUUUGCCACAUUCA | 9145 | UGAAUGUGGCAAAAGCACU |
| siRNA 3656 | 3656 | GUGCUUUUGCCACAUUCAA | 9146 | UUGAAUGUGGCAAAAGCAC |
| siRNA 3657 | 3657 | UGCUUUUGCCACAUUCAAA | 9147 | UUUGAAUGUGGCAAAAGCA |
| siRNA 3658 | 3658 | GCUUUUGCCACAUUCAAAG | 9148 | CUUUGAAUGUGGCAAAAGC |
| siRNA 3659 | 3659 | CUUUUGCCACAUUCAAAGU | 9149 | ACUUUGAAUGUGGCAAAAG |
| siRNA 3660 | 3660 | UUUUGCCACAUUCAAAGUC | 9150 | GACUUUGAAUGUGGCAAAA |
| siRNA 3661 | 3661 | UUUGCCACAUUCAAAGUCU | 9151 | AGACUUUGAAUGUGGCAAA |
| siRNA 3662 | 3662 | UUGCCACAUUCAAAGUCUU | 9152 | AAGACUUUGAAUGUGGCAA |
| siRNA 3663 | 3663 | UGCCACAUUCAAAGUCUUU | 9153 | AAAGACUUUGAAUGUGGCA |
| siRNA 3664 | 3664 | GCCACAUUCAAAGUCUUUC | 9154 | GAAAGACUUUGAAUGUGGC |
| siRNA 3665 | 3665 | CCACAUUCAAAGUCUUUCU | 9155 | AGAAAGACUUUGAAUGUGG |
| siRNA 3666 | 3666 | CACAUUCAAAGUCUUUCUU | 9156 | AAGAAAGACUUUGAAUGUG |
| siRNA 3667 | 3667 | ACAUUCAAAGUCUUUCUUU | 9157 | AAAGAAAGACUUUGAAUGU |
| siRNA 3668 | 3668 | CAUUCAAAGUCUUUCUUUA | 9158 | UAAAGAAAGACUUUGAAUG |
| siRNA 3669 | 3669 | AUUCAAAGUCUUUCUUUAG | 9159 | CUAAAGAAAGACUUUGAAU |
| siRNA 3670 | 3670 | UUCAAAGUCUUUCUUUAGU | 9160 | ACUAAAGAAAGACUUUGAA |
| siRNA 3671 | 3671 | UCAAAGUCUUUCUUUAGUU | 9161 | AACUAAAGAAAGACUUUGA |
| siRNA 3672 | 3672 | CAAAGUCUUUCUUUAGUUC | 9162 | GAACUAAAGAAAGACUUUG |
| siRNA 3673 | 3673 | AAAGUCUUUCUUUAGUUCA | 9163 | UGAACUAAAGAAAGACUUU |
| siRNA 3674 | 3674 | AAGUCUUUCUUUAGUUCAU | 9164 | AUGAACUAAAGAAAGACUU |
| siRNA 3675 | 3675 | AGUCUUUCUUUAGUUCAUG | 9165 | CAUGAACUAAAGAAAGACU |
| siRNA 3676 | 3676 | GUCUUUCUUUAGUUCAUGU | 9166 | ACAUGAACUAAAGAAAGAC |
| siRNA 3677 | 3677 | UCUUUCUUUAGUUCAUGUG | 9167 | CACAUGAACUAAAGAAAGA |
| siRNA 3678 | 3678 | CUUUCUUUAGUUCAUGUGG | 9168 | CCACAUGAACUAAAGAAAG |
| siRNA 3679 | 3679 | UUUCUUUAGUUCAUGUGGU | 9169 | ACCACAUGAACUAAAGAAA |
| siRNA 3680 | 3680 | UUCUUUAGUUCAUGUGGUA | 9170 | UACCACAUGAACUAAAGAA |
| siRNA 3681 | 3681 | UCUUUAGUUCAUGUGGUAG | 9171 | CUACCACAUGAACUAAAGA |
| siRNA 3682 | 3682 | CUUUAGUUCAUGUGGUAGU | 9172 | ACUACCACAUGAACUAAAG |
| siRNA 3683 | 3683 | UUUAGUUCAUGUGGUAGUU | 9173 | AACUACCACAUGAACUAAA |
| siRNA 3684 | 3684 | UUAGUUCAUGUGGUAGUUU | 9174 | AAACUACCACAUGAACUAA |
| siRNA 3685 | 3685 | UAGUUCAUGUGGUAGUUUA | 9175 | UAAACUACCACAUGAACUA |
| siRNA 3686 | 3686 | AGUUCAUGUGGUAGUUUAC | 9176 | GUAAACUACCACAUGAACU |
| siRNA 3687 | 3687 | GUUCAUGUGGUAGUUUACA | 9177 | UGUAAACUACCACAUGAAC |
| siRNA 3688 | 3688 | UUCAUGUGGUAGUUUACAU | 9178 | AUGUAAACUACCACAUGAA |
| siRNA 3689 | 3689 | UCAUGUGGUAGUUUACAUA | 9179 | UAUGUAAACUACCACAUGA |
| siRNA 3690 | 3690 | CAUGUGGUAGUUUACAUAA | 9180 | UUAUGUAAACUACCACAUG |
| siRNA 3691 | 3691 | AUGUGGUAGUUUACAUAAA | 9181 | UUUAUGUAAACUACCACAU |
| siRNA 3692 | 3692 | UGUGGUAGUUUACAUAAAC | 9182 | GUUUAUGUAAACUACCACA |
| siRNA 3693 | 3693 | GUGGUAGUUUACAUAAACU | 9183 | AGUUUAUGUAAACUACCAC |
| siRNA 3694 | 3694 | UGGUAGUUUACAUAAACUA | 9184 | UAGUUUAUGUAAACUACCA |
| siRNA 3695 | 3695 | GGUAGUUUACAUAAACUAA | 9185 | UUAGUUUAUGUAAACUACC |
| siRNA 3696 | 3696 | GUAGUUUACAUAAACUAAG | 9186 | CUUAGUUUAUGUAAACUAC |
| siRNA 3697 | 3697 | UAGUUUACAUAAACUAAGU | 9187 | ACUUAGUUUAUGUAAACUA |
| siRNA 3698 | 3698 | AGUUUACAUAAACUAAGUG | 9188 | CACUUAGUUUAUGUAAACU |
| siRNA 3699 | 3699 | GUUUACAUAAACUAAGUGA | 9189 | UCACUUAGUUUAUGUAAAC |
| siRNA 3700 | 3700 | UUUACAUAAACUAAGUGAA | 9190 | UUCACUUAGUUUAUGUAAA |
| siRNA 3701 | 3701 | UUACAUAAACUAAGUGAAG | 9191 | CUUCACUUAGUUUAUGUAA |
| siRNA 3702 | 3702 | UACAUAAACUAAGUGAAGA | 9192 | UCUUCACUUAGUUUAUGUA |
| siRNA 3703 | 3703 | ACAUAAACUAAGUGAAGAG | 9193 | CUCUUCACUUAGUUUAUGU |
| siRNA 3704 | 3704 | CAUAAACUAAGUGAAGAGC | 9194 | GCUCUUCACUUAGUUUAUG |
| siRNA 3705 | 3705 | AUAAACUAAGUGAAGAGCC | 9195 | GGCUCUUCACUUAGUUUAU |
| siRNA 3706 | 3706 | UAAACUAAGUGAAGAGCCC | 9196 | GGGCUCUUCACUUAGUUUA |
| siRNA 3707 | 3707 | AAACUAAGUGAAGAGCCCC | 9197 | GGGGCUCUUCACUUAGUUU |
| siRNA 3708 | 3708 | AACUAAGUGAAGAGCCCCU | 9198 | AGGGGCUCUUCACUUAGUU |
| siRNA 3709 | 3709 | ACUAAGUGAAGAGCCCCUG | 9199 | CAGGGGCUCUUCACUUAGU |
| siRNA 3710 | 3710 | CUAAGUGAAGAGCCCCUGA | 9200 | UCAGGGGCUCUUCACUUAG |
| siRNA 3711 | 3711 | UAAGUGAAGAGCCCCUGAU | 9201 | AUCAGGGGCUCUUCACUUA |
| siRNA 3712 | 3712 | AAGUGAAGAGCCCCUGAUU | 9202 | AAUCAGGGGCUCUUCACUU |
| siRNA 3713 | 3713 | AGUGAAGAGCCCCUGAUUC | 9203 | GAAUCAGGGGCUCUUCACU |
| siRNA 3714 | 3714 | GUGAAGAGCCCCUGAUUCC | 9204 | GGAAUCAGGGGCUCUUCAC |
| siRNA 3715 | 3715 | UGAAGAGCCCCUGAUUCCU | 9205 | AGGAAUCAGGGGCUCUUCA |
| siRNA 3716 | 3716 | GAAGAGCCCCUGAUUCCUC | 9206 | GAGGAAUCAGGGGCUCUUC |
| siRNA 3717 | 3717 | AAGAGCCCCUGAUUCCUCC | 9207 | GGAGGAAUCAGGGGCUCUU |
| siRNA 3718 | 3718 | AGAGCCCCUGAUUCCUCCU | 9208 | AGGAGGAAUCAGGGGCUCU |
| siRNA 3719 | 3719 | GAGCCCCUGAUUCCUCCUC | 9209 | GAGGAGGAAUCAGGGGCUC |
| siRNA 3720 | 3720 | AGCCCCUGAUUCCUCCUCC | 9210 | GGAGGAGGAAUCAGGGGCU |
| siRNA 3721 | 3721 | GCCCCUGAUUCCUCCUCCU | 9211 | AGGAGGAGGAAUCAGGGGC |
| siRNA 3722 | 3722 | CCCCUGAUUCCUCCUCCUC | 9212 | GAGGAGGAGGAAUCAGGGG |
| siRNA 3723 | 3723 | CCCUGAUUCCUCCUCCUCU | 9213 | AGAGGAGGAGGAAUCAGGG |
| siRNA 3724 | 3724 | CCUGAUUCCUCCUCCUCUU | 9214 | AAGAGGAGGAGGAAUCAGG |
| siRNA 3725 | 3725 | CUGAUUCCUCCUCCUCUUC | 9215 | GAAGAGGAGGAGGAAUCAG |
| siRNA 3726 | 3726 | UGAUUCCUCCUCCUCUUCC | 9216 | GGAAGAGGAGGAGGAAUCA |
| siRNA 3727 | 3727 | GAUUCCUCCUCCUCUUCCU | 9217 | AGGAAGAGGAGGAGGAAUC |
| siRNA 3728 | 3728 | AUUCCUCCUCCUCUUCCUC | 9218 | GAGGAAGAGGAGGAGGAAU |
| siRNA 3729 | 3729 | UUCCUCCUCCUCUUCCUCC | 9219 | GGAGGAAGAGGAGGAGGAA |
| siRNA 3730 | 3730 | UCCUCCUCCUCUUCCUCCU | 9220 | AGGAGGAAGAGGAGGAGGA |
| siRNA 3731 | 3731 | CCUCCUCCUCUUCCUCCUC | 9221 | GAGGAGGAAGAGGAGGAGG |
| siRNA 3732 | 3732 | CUCCUCCUCUUCCUCCUCG | 9222 | CGAGGAGGAAGAGGAGGAG |
| siRNA 3733 | 3733 | UCCUCCUCUUCCUCCUCGA | 9223 | UCGAGGAGGAAGAGGAGGA |
| siRNA 3734 | 3734 | CCUCCUCUUCCUCCUCGAA | 9224 | UUCGAGGAGGAAGAGGAGG |
| siRNA 3735 | 3735 | CUCCUCUUCCUCCUCGAAA | 9225 | UUUCGAGGAGGAAGAGGAG |
| siRNA 3736 | 3736 | UCCUCUUCCUCCUCGAAAA | 9226 | UUUUCGAGGAGGAAGAGGA |
| siRNA 3737 | 3737 | CCUCUUCCUCCUCGAAAAA | 9227 | UUUUUCGAGGAGGAAGAGG |
| siRNA 3738 | 3738 | CUCUUCCUCCUCGAAAAAA | 9228 | UUUUUUCGAGGAGGAAGAG |
| siRNA 3739 | 3739 | UCUUCCUCCUCGAAAAAAG | 9229 | CUUUUUUCGAGGAGGAAGA |
| siRNA 3740 | 3740 | CUUCCUCCUCGAAAAAAGU | 9230 | ACUUUUUUCGAGGAGGAAG |
| siRNA 3741 | 3741 | UUCCUCCUCGAAAAAAGUU | 9231 | AACUUUUUUCGAGGAGGAA |
| siRNA 3742 | 3742 | UCCUCCUCGAAAAAAGUUU | 9232 | AAACUUUUUUCGAGGAGGA |
| siRNA 3743 | 3743 | CCUCCUCGAAAAAAGUUUG | 9233 | CAAACUUUUUUCGAGGAGG |
| siRNA 3744 | 3744 | CUCCUCGAAAAAAGUUUGA | 9234 | UCAAACUUUUUUCGAGGAG |
| siRNA 3745 | 3745 | UCCUCGAAAAAAGUUUGAU | 9235 | AUCAAACUUUUUUCGAGGA |
| siRNA 3746 | 3746 | CCUCGAAAAAAGUUUGAUC | 9236 | GAUCAAACUUUUUUCGAGG |
| siRNA 3747 | 3747 | CUCGAAAAAAGUUUGAUCA | 9237 | UGAUCAAACUUUUUUCGAG |
| siRNA 3748 | 3748 | UCGAAAAAAGUUUGAUCAU | 9238 | AUGAUCAAACUUUUUUCGA |
| siRNA 3749 | 3749 | CGAAAAAAGUUUGAUCAUG | 9239 | CAUGAUCAAACUUUUUUCG |
| siRNA 3750 | 3750 | GAAAAAAGUUUGAUCAUGA | 9240 | UCAUGAUCAAACUUUUUUC |
| siRNA 3751 | 3751 | AAAAAAGUUUGAUCAUGAU | 9241 | AUCAUGAUCAAACUUUUUU |
| siRNA 3752 | 3752 | AAAAAGUUUGAUCAUGAUG | 9242 | CAUCAUGAUCAAACUUUUU |
| siRNA 3753 | 3753 | AAAAGUUUGAUCAUGAUGC | 9243 | GCAUCAUGAUCAAACUUUU |
| siRNA 3754 | 3754 | AAAGUUUGAUCAUGAUGCU | 9244 | AGCAUCAUGAUCAAACUUU |
| siRNA 3755 | 3755 | AAGUUUGAUCAUGAUGCUU | 9245 | AAGCAUCAUGAUCAAACUU |
| siRNA 3756 | 3756 | AGUUUGAUCAUGAUGCUUC | 9246 | GAAGCAUCAUGAUCAAACU |
| siRNA 3757 | 3757 | GUUUGAUCAUGAUGCUUCA | 9247 | UGAAGCAUCAUGAUCAAAC |
| siRNA 3758 | 3758 | UUUGAUCAUGAUGCUUCAA | 9248 | UUGAAGCAUCAUGAUCAAA |
| siRNA 3759 | 3759 | UUGAUCAUGAUGCUUCAAA | 9249 | UUUGAAGCAUCAUGAUCAA |
| siRNA 3760 | 3760 | UGAUCAUGAUGCUUCAAAU | 9250 | AUUUGAAGCAUCAUGAUCA |
| siRNA 3761 | 3761 | GAUCAUGAUGCUUCAAAUU | 9251 | AAUUUGAAGCAUCAUGAUC |
| siRNA 3762 | 3762 | AUCAUGAUGCUUCAAAUUC | 9252 | GAAUUUGAAGCAUCAUGAU |
| siRNA 3763 | 3763 | UCAUGAUGCUUCAAAUUCC | 9253 | GGAAUUUGAAGCAUCAUGA |
| siRNA 3764 | 3764 | CAUGAUGCUUCAAAUUCCA | 9254 | UGGAAUUUGAAGCAUCAUG |
| siRNA 3765 | 3765 | AUGAUGCUUCAAAUUCCAA | 9255 | UUGGAAUUUGAAGCAUCAU |
| siRNA 3766 | 3766 | UGAUGCUUCAAAUUCCAAG | 9256 | CUUGGAAUUUGAAGCAUCA |
| siRNA 3767 | 3767 | GAUGCUUCAAAUUCCAAGG | 9257 | CCUUGGAAUUUGAAGCAUC |
| siRNA 3768 | 3768 | AUGCUUCAAAUUCCAAGGG | 9258 | CCCUUGGAAUUUGAAGCAU |
| siRNA 3769 | 3769 | UGCUUCAAAUUCCAAGGGA | 9259 | UCCCUUGGAAUUUGAAGCA |
| siRNA 3770 | 3770 | GCUUCAAAUUCCAAGGGAA | 9260 | UUCCCUUGGAAUUUGAAGC |
| siRNA 3771 | 3771 | CUUCAAAUUCCAAGGGAAA | 9261 | UUUCCCUUGGAAUUUGAAG |
| siRNA 3772 | 3772 | UUCAAAUUCCAAGGGAAAU | 9262 | AUUUCCCUUGGAAUUUGAA |
| siRNA 3773 | 3773 | UCAAAUUCCAAGGGAAAUA | 9263 | UAUUUCCCUUGGAAUUUGA |
| siRNA 3774 | 3774 | CAAAUUCCAAGGGAAAUAU | 9264 | AUAUUUCCCUUGGAAUUUG |
| siRNA 3775 | 3775 | AAAUUCCAAGGGAAAUAUG | 9265 | CAUAUUUCCCUUGGAAUUU |
| siRNA 3776 | 3776 | AAUUCCAAGGGAAAUAUGA | 9266 | UCAUAUUUCCCUUGGAAUU |
| siRNA 3777 | 3777 | AUUCCAAGGGAAAUAUGAA | 9267 | UUCAUAUUUCCCUUGGAAU |
| siRNA 3778 | 3778 | UUCCAAGGGAAAUAUGAAA | 9268 | UUUCAUAUUUCCCUUGGAA |
| siRNA 3779 | 3779 | UCCAAGGGAAAUAUGAAAU | 9269 | AUUUCAUAUUUCCCUUGGA |
| siRNA 3780 | 3780 | CCAAGGGAAAUAUGAAAUC | 9270 | GAUUUCAUAUUUCCCUUGG |
| siRNA 3781 | 3781 | CAAGGGAAAUAUGAAAUCU | 9271 | AGAUUUCAUAUUUCCCUUG |
| siRNA 3782 | 3782 | AAGGGAAAUAUGAAAUCUG | 9272 | CAGAUUUCAUAUUUCCCUU |
| siRNA 3783 | 3783 | AGGGAAAUAUGAAAUCUGA | 9273 | UCAGAUUUCAUAUUUCCCU |
| siRNA 3784 | 3784 | GGGAAAUAUGAAAUCUGAU | 9274 | AUCAGAUUUCAUAUUUCCC |
| siRNA 3785 | 3785 | GGAAAUAUGAAAUCUGAUG | 9275 | CAUCAGAUUUCAUAUUUCC |
| siRNA 3786 | 3786 | GAAAUAUGAAAUCUGAUGA | 9276 | UCAUCAGAUUUCAUAUUUC |
| siRNA 3787 | 3787 | AAAUAUGAAAUCUGAUGAU | 9277 | AUCAUCAGAUUUCAUAUUU |
| siRNA 3788 | 3788 | AAUAUGAAAUCUGAUGAUG | 9278 | CAUCAUCAGAUUUCAUAUU |
| siRNA 3789 | 3789 | AUAUGAAAUCUGAUGAUGA | 9279 | UCAUCAUCAGAUUUCAUAU |
| siRNA 3790 | 3790 | UAUGAAAUCUGAUGAUGAU | 9280 | AUCAUCAUCAGAUUUCAUA |
| siRNA 3791 | 3791 | AUGAAAUCUGAUGAUGAUC | 9281 | GAUCAUCAUCAGAUUUCAU |
| siRNA 3792 | 3792 | UGAAAUCUGAUGAUGAUCC | 9282 | GGAUCAUCAUCAGAUUUCA |
| siRNA 3793 | 3793 | GAAAUCUGAUGAUGAUCCU | 9283 | AGGAUCAUCAUCAGAUUUC |
| siRNA 3794 | 3794 | AAAUCUGAUGAUGAUCCUC | 9284 | GAGGAUCAUCAUCAGAUUU |
| siRNA 3795 | 3795 | AAUCUGAUGAUGAUCCUCC | 9285 | GGAGGAUCAUCAUCAGAUU |
| siRNA 3796 | 3796 | AUCUGAUGAUGAUCCUCCU | 9286 | AGGAGGAUCAUCAUCAGAU |
| siRNA 3797 | 3797 | UCUGAUGAUGAUCCUCCUG | 9287 | CAGGAGGAUCAUCAUCAGA |
| siRNA 3798 | 3798 | CUGAUGAUGAUCCUCCUGC | 9288 | GCAGGAGGAUCAUCAUCAG |
| siRNA 3799 | 3799 | UGAUGAUGAUCCUCCUGCU | 9289 | AGCAGGAGGAUCAUCAUCA |
| siRNA 3800 | 3800 | GAUGAUGAUCCUCCUGCUA | 9290 | UAGCAGGAGGAUCAUCAUC |
| siRNA 3801 | 3801 | AUGAUGAUCCUCCUGCUAU | 9291 | AUAGCAGGAGGAUCAUCAU |
| siRNA 3802 | 3802 | UGAUGAUCCUCCUGCUAUU | 9292 | AAUAGCAGGAGGAUCAUCA |
| siRNA 3803 | 3803 | GAUGAUCCUCCUGCUAUUC | 9293 | GAAUAGCAGGAGGAUCAUC |
| siRNA 3804 | 3804 | AUGAUCCUCCUGCUAUUCC | 9294 | GGAAUAGCAGGAGGAUCAU |
| siRNA 3805 | 3805 | UGAUCCUCCUGCUAUUCCA | 9295 | UGGAAUAGCAGGAGGAUCA |
| siRNA 3806 | 3806 | GAUCCUCCUGCUAUUCCAC | 9296 | GUGGAAUAGCAGGAGGAUC |
| siRNA 3807 | 3807 | AUCCUCCUGCUAUUCCACC | 9297 | GGUGGAAUAGCAGGAGGAU |
| siRNA 3808 | 3808 | UCCUCCUGCUAUUCCACCG | 9298 | CGGUGGAAUAGCAGGAGGA |
| siRNA 3809 | 3809 | CCUCCUGCUAUUCCACCGA | 9299 | UCGGUGGAAUAGCAGGAGG |
| siRNA 3810 | 3810 | CUCCUGCUAUUCCACCGAG | 9300 | CUCGGUGGAAUAGCAGGAG |
| siRNA 3811 | 3811 | UCCUGCUAUUCCACCGAGA | 9301 | UCUCGGUGGAAUAGCAGGA |
| siRNA 3812 | 3812 | CCUGCUAUUCCACCGAGAC | 9302 | GUCUCGGUGGAAUAGCAGG |
| siRNA 3813 | 3813 | CUGCUAUUCCACCGAGACA | 9303 | UGUCUCGGUGGAAUAGCAG |
| siRNA 3814 | 3814 | UGCUAUUCCACCGAGACAG | 9304 | CUGUCUCGGUGGAAUAGCA |
| siRNA 3815 | 3815 | GCUAUUCCACCGAGACAGC | 9305 | GCUGUCUCGGUGGAAUAGC |
| siRNA 3816 | 3816 | CUAUUCCACCGAGACAGCC | 9306 | GGCUGUCUCGGUGGAAUAG |
| siRNA 3817 | 3817 | UAUUCCACCGAGACAGCCU | 9307 | AGGCUGUCUCGGUGGAAUA |
| siRNA 3818 | 3818 | AUUCCACCGAGACAGCCUC | 9308 | GAGGCUGUCUCGGUGGAAU |
| siRNA 3819 | 3819 | UUCCACCGAGACAGCCUCC | 9309 | GGAGGCUGUCUCGGUGGAA |
| siRNA 3820 | 3820 | UCCACCGAGACAGCCUCCU | 9310 | AGGAGGCUGUCUCGGUGGA |
| siRNA 3821 | 3821 | CCACCGAGACAGCCUCCUC | 9311 | GAGGAGGCUGUCUCGGUGG |
| siRNA 3822 | 3822 | CACCGAGACAGCCUCCUCC | 9312 | GGAGGAGGCUGUCUCGGUG |
| siRNA 3823 | 3823 | ACCGAGACAGCCUCCUCCU | 9313 | AGGAGGAGGCUGUCUCGGU |
| siRNA 3824 | 3824 | CCGAGACAGCCUCCUCCUC | 9314 | GAGGAGGAGGCUGUCUCGG |
| siRNA 3825 | 3825 | CGAGACAGCCUCCUCCUCC | 9315 | GGAGGAGGAGGCUGUCUCG |
| siRNA 3826 | 3826 | GAGACAGCCUCCUCCUCCA | 9316 | UGGAGGAGGAGGCUGUCUC |
| siRNA 3827 | 3827 | AGACAGCCUCCUCCUCCAA | 9317 | UUGGAGGAGGAGGCUGUCU |
| siRNA 3828 | 3828 | GACAGCCUCCUCCUCCAAA | 9318 | UUUGGAGGAGGAGGCUGUC |
| siRNA 3829 | 3829 | ACAGCCUCCUCCUCCAAAG | 9319 | CUUUGGAGGAGGAGGCUGU |
| siRNA 3830 | 3830 | CAGCCUCCUCCUCCAAAGG | 9320 | CCUUUGGAGGAGGAGGCUG |
| siRNA 3831 | 3831 | AGCCUCCUCCUCCAAAGGU | 9321 | ACCUUUGGAGGAGGAGGCU |
| siRNA 3832 | 3832 | GCCUCCUCCUCCAAAGGUA | 9322 | UACCUUUGGAGGAGGAGGC |
| siRNA 3833 | 3833 | CCUCCUCCUCCAAAGGUAA | 9323 | UUACCUUUGGAGGAGGAGG |
| siRNA 3834 | 3834 | CUCCUCCUCCAAAGGUAAA | 9324 | UUUACCUUUGGAGGAGGAG |
| siRNA 3835 | 3835 | UCCUCCUCCAAAGGUAAAA | 9325 | UUUUACCUUUGGAGGAGGA |
| siRNA 3836 | 3836 | CCUCCUCCAAAGGUAAAAC | 9326 | GUUUUACCUUUGGAGGAGG |
| siRNA 3837 | 3837 | CUCCUCCAAAGGUAAAACC | 9327 | GGUUUUACCUUUGGAGGAG |
| siRNA 3838 | 3838 | UCCUCCAAAGGUAAAACCC | 9328 | GGGUUUUACCUUUGGAGGA |
| siRNA 3839 | 3839 | CCUCCAAAGGUAAAACCCA | 9329 | UGGGUUUUACCUUUGGAGG |
| siRNA 3840 | 3840 | CUCCAAAGGUAAAACCCAG | 9330 | CUGGGUUUUACCUUUGGAG |
| siRNA 3841 | 3841 | UCCAAAGGUAAAACCCAGA | 9331 | UCUGGGUUUUACCUUUGGA |
| siRNA 3842 | 3842 | CCAAAGGUAAAACCCAGAG | 9332 | CUCUGGGUUUUACCUUUGG |
| siRNA 3843 | 3843 | CAAAGGUAAAACCCAGAGU | 9333 | ACUCUGGGUUUUACCUUUG |
| siRNA 3844 | 3844 | AAAGGUAAAACCCAGAGUU | 9334 | AACUCUGGGUUUUACCUUU |
| siRNA 3845 | 3845 | AAGGUAAAACCCAGAGUUC | 9335 | GAACUCUGGGUUUUACCUU |
| siRNA 3846 | 3846 | AGGUAAAACCCAGAGUUCC | 9336 | GGAACUCUGGGUUUUACCU |
| siRNA 3847 | 3847 | GGUAAAACCCAGAGUUCCU | 9337 | AGGAACUCUGGGUUUUACC |
| siRNA 3848 | 3848 | GUAAAACCCAGAGUUCCUG | 9338 | CAGGAACUCUGGGUUUUAC |
| siRNA 3849 | 3849 | UAAAACCCAGAGUUCCUGU | 9339 | ACAGGAACUCUGGGUUUUA |
| siRNA 3850 | 3850 | AAAACCCAGAGUUCCUGUU | 9340 | AACAGGAACUCUGGGUUUU |
| siRNA 3851 | 3851 | AAACCCAGAGUUCCUGUUC | 9341 | GAACAGGAACUCUGGGUUU |
| siRNA 3852 | 3852 | AACCCAGAGUUCCUGUUCC | 9342 | GGAACAGGAACUCUGGGUU |
| siRNA 3853 | 3853 | ACCCAGAGUUCCUGUUCCU | 9343 | AGGAACAGGAACUCUGGGU |
| siRNA 3854 | 3854 | CCCAGAGUUCCUGUUCCUA | 9344 | UAGGAACAGGAACUCUGGG |
| siRNA 3855 | 3855 | CCAGAGUUCCUGUUCCUAC | 9345 | GUAGGAACAGGAACUCUGG |
| siRNA 3856 | 3856 | CAGAGUUCCUGUUCCUACU | 9346 | AGUAGGAACAGGAACUCUG |
| siRNA 3857 | 3857 | AGAGUUCCUGUUCCUACUG | 9347 | CAGUAGGAACAGGAACUCU |
| siRNA 3858 | 3858 | GAGUUCCUGUUCCUACUGG | 9348 | CCAGUAGGAACAGGAACUC |
| siRNA 3859 | 3859 | AGUUCCUGUUCCUACUGGU | 9349 | ACCAGUAGGAACAGGAACU |
| siRNA 3860 | 3860 | GUUCCUGUUCCUACUGGUG | 9350 | CACCAGUAGGAACAGGAAC |
| siRNA 3861 | 3861 | UUCCUGUUCCUACUGGUGC | 9351 | GCACCAGUAGGAACAGGAA |
| siRNA 3862 | 3862 | UCCUGUUCCUACUGGUGCA | 9352 | UGCACCAGUAGGAACAGGA |
| siRNA 3863 | 3863 | CCUGUUCCUACUGGUGCAU | 9353 | AUGCACCAGUAGGAACAGG |
| siRNA 3864 | 3864 | CUGUUCCUACUGGUGCAUU | 9354 | AAUGCACCAGUAGGAACAG |
| siRNA 3865 | 3865 | UGUUCCUACUGGUGCAUUU | 9355 | AAAUGCACCAGUAGGAACA |
| siRNA 3866 | 3866 | GUUCCUACUGGUGCAUUUG | 9356 | CAAAUGCACCAGUAGGAAC |
| siRNA 3867 | 3867 | UUCCUACUGGUGCAUUUGA | 9357 | UCAAAUGCACCAGUAGGAA |
| siRNA 3868 | 3868 | UCCUACUGGUGCAUUUGAU | 9358 | AUCAAAUGCACCAGUAGGA |
| siRNA 3869 | 3869 | CCUACUGGUGCAUUUGAUG | 9359 | CAUCAAAUGCACCAGUAGG |
| siRNA 3870 | 3870 | CUACUGGUGCAUUUGAUGG | 9360 | CCAUCAAAUGCACCAGUAG |
| siRNA 3871 | 3871 | UACUGGUGCAUUUGAUGGG | 9361 | CCCAUCAAAUGCACCAGUA |
| siRNA 3872 | 3872 | ACUGGUGCAUUUGAUGGGC | 9362 | GCCCAUCAAAUGCACCAGU |
| siRNA 3873 | 3873 | CUGGUGCAUUUGAUGGGCC | 9363 | GGCCCAUCAAAUGCACCAG |
| siRNA 3874 | 3874 | UGGUGCAUUUGAUGGGCCU | 9364 | AGGCCCAUCAAAUGCACCA |
| siRNA 3875 | 3875 | GGUGCAUUUGAUGGGCCUC | 9365 | GAGGCCCAUCAAAUGCACC |
| siRNA 3876 | 3876 | GUGCAUUUGAUGGGCCUCU | 9366 | AGAGGCCCAUCAAAUGCAC |
| siRNA 3877 | 3877 | UGCAUUUGAUGGGCCUCUG | 9367 | CAGAGGCCCAUCAAAUGCA |
| siRNA 3878 | 3878 | GCAUUUGAUGGGCCUCUGC | 9368 | GCAGAGGCCCAUCAAAUGC |
| siRNA 3879 | 3879 | CAUUUGAUGGGCCUCUGCA | 9369 | UGCAGAGGCCCAUCAAAUG |
| siRNA 3880 | 3880 | AUUUGAUGGGCCUCUGCAU | 9370 | AUGCAGAGGCCCAUCAAAU |
| siRNA 3881 | 388 | UUUGAUGGGCCUCUGCAUA | 9371 | UAUGCAGAGGCCCAUCAAA |
| siRNA 3882 | 3882 | UUGAUGGGCCUCUGCAUAG | 9372 | CUAUGCAGAGGCCCAUCAA |
| siRNA 3883 | 3883 | UGAUGGGCCUCUGCAUAGU | 9373 | ACUAUGCAGAGGCCCAUCA |
| siRNA 3884 | 3884 | GAUGGGCCUCUGCAUAGUC | 9374 | GACUAUGCAGAGGCCCAUC |
| siRNA 3885 | 3885 | AUGGGCCUCUGCAUAGUCC | 9375 | GGACUAUGCAGAGGCCCAU |
| siRNA 3886 | 3886 | UGGGCCUCUGCAUAGUCCA | 9376 | UGGACUAUGCAGAGGCCCA |
| siRNA 3887 | 3887 | GGGCCUCUGCAUAGUCCAC | 9377 | GUGGACUAUGCAGAGGCCC |
| siRNA 3888 | 3888 | GGCCUCUGCAUAGUCCACC | 9378 | GGUGGACUAUGCAGAGGCC |
| siRNA 3889 | 3889 | GCCUCUGCAUAGUCCACCU | 9379 | AGGUGGACUAUGCAGAGGC |
| siRNA 3890 | 3890 | CCUCUGCAUAGUCCACCUC | 9380 | GAGGUGGACUAUGCAGAGG |
| siRNA 3891 | 3891 | CUCUGCAUAGUCCACCUCC | 9381 | GGAGGUGGACUAUGCAGAG |
| siRNA 3892 | 3892 | UCUGCAUAGUCCACCUCCG | 9382 | CGGAGGUGGACUAUGCAGA |
| siRNA 3893 | 3893 | CUGCAUAGUCCACCUCCGC | 9383 | GCGGAGGUGGACUAUGCAG |
| siRNA 3894 | 3894 | UGCAUAGUCCACCUCCGCC | 9384 | GGCGGAGGUGGACUAUGCA |
| siRNA 3895 | 3895 | GCAUAGUCCACCUCCGCCA | 9385 | UGGCGGAGGUGGACUAUGC |
| siRNA 3896 | 3896 | CAUAGUCCACCUCCGCCAC | 9386 | GUGGCGGAGGUGGACUAUG |
| siRNA 3897 | 3897 | AUAGUCCACCUCCGCCACC | 9387 | GGUGGCGGAGGUGGACUAU |
| siRNA 3898 | 3898 | UAGUCCACCUCCGCCACCA | 9388 | UGGUGGCGGAGGUGGACUA |
| siRNA 3899 | 3899 | AGUCCACCUCCGCCACCAC | 9389 | GUGGUGGCGGAGGUGGACU |
| siRNA 3900 | 3900 | GUCCACCUCCGCCACCACC | 9390 | GGUGGUGGCGGAGGUGGAC |
| siRNA 3901 | 3901 | UCCACCUCCGCCACCACCA | 9391 | UGGUGGUGGCGGAGGUGGA |
| siRNA 3902 | 3902 | CCACCUCCGCCACCACCAA | 9392 | UUGGUGGUGGCGGAGGUGG |
| siRNA 3903 | 3903 | CACCUCCGCCACCACCAAG | 9393 | CUUGGUGGUGGCGGAGGUG |
| siRNA 3904 | 3904 | ACCUCCGCCACCACCAAGA | 9394 | UCUUGGUGGUGGCGGAGGU |
| siRNA 3905 | 3905 | CCUCCGCCACCACCAAGAG | 9395 | CUCUUGGUGGUGGCGGAGG |
| siRNA 3906 | 3906 | CUCCGCCACCACCAAGAGA | 9396 | UCUCUUGGUGGUGGCGGAG |
| siRNA 3907 | 3907 | UCCGCCACCACCAAGAGAU | 9397 | AUCUCUUGGUGGUGGCGGA |
| siRNA 3908 | 3908 | CCGCCACCACCAAGAGAUC | 9398 | GAUCUCUUGGUGGUGGCGG |
| siRNA 3909 | 3909 | CGCCACCACCAAGAGAUCC | 9399 | GGAUCUCUUGGUGGUGGCG |
| siRNA 3910 | 3910 | GCCACCACCAAGAGAUCCU | 9400 | AGGAUCUCUUGGUGGUGGC |
| siRNA 3911 | 3911 | CCACCACCAAGAGAUCCUC | 9401 | GAGGAUCUCUUGGUGGUGG |
| siRNA 3912 | 3912 | CACCACCAAGAGAUCCUCU | 9402 | AGAGGAUCUCUUGGUGGUG |
| siRNA 3913 | 3913 | ACCACCAAGAGAUCCUCUU | 9403 | AAGAGGAUCUCUUGGUGGU |
| siRNA 3914 | 3914 | CCACCAAGAGAUCCUCUUC | 9404 | GAAGAGGAUCUCUUGGUGG |
| siRNA 3915 | 3915 | CACCAAGAGAUCCUCUUCC | 9405 | GGAAGAGGAUCUCUUGGUG |
| siRNA 3916 | 3916 | ACCAAGAGAUCCUCUUCCU | 9406 | AGGAAGAGGAUCUCUUGGU |
| siRNA 3917 | 3917 | CCAAGAGAUCCUCUUCCUG | 9407 | CAGGAAGAGGAUCUCUUGG |
| siRNA 3918 | 3918 | CAAGAGAUCCUCUUCCUGA | 9408 | UCAGGAAGAGGAUCUCUUG |
| siRNA 3919 | 3919 | AAGAGAUCCUCUUCCUGAU | 9409 | AUCAGGAAGAGGAUCUCUU |
| siRNA 3920 | 3920 | AGAGAUCCUCUUCCUGAUA | 9410 | UAUCAGGAAGAGGAUCUCU |
| siRNA 3921 | 3921 | GAGAUCCUCUUCCUGAUAC | 9411 | GUAUCAGGAAGAGGAUCUC |
| siRNA 3922 | 3922 | AGAUCCUCUUCCUGAUACC | 9412 | GGUAUCAGGAAGAGGAUCU |
| siRNA 3923 | 3923 | GAUCCUCUUCCUGAUACCC | 9413 | GGGUAUCAGGAAGAGGAUC |
| siRNA 3924 | 3924 | AUCCUCUUCCUGAUACCCC | 9414 | GGGGUAUCAGGAAGAGGAU |
| siRNA 3925 | 3925 | UCCUCUUCCUGAUACCCCU | 9415 | AGGGGUAUCAGGAAGAGGA |
| siRNA 3926 | 3926 | CCUCUUCCUGAUACCCCUC | 9416 | GAGGGGUAUCAGGAAGAGG |
| siRNA 3927 | 3927 | CUCUUCCUGAUACCCCUCC | 9417 | GGAGGGGUAUCAGGAAGAG |
| siRNA 3928 | 3928 | UCUUCCUGAUACCCCUCCA | 9418 | UGGAGGGGUAUCAGGAAGA |
| siRNA 3929 | 3929 | CUUCCUGAUACCCCUCCAC | 9419 | GUGGAGGGGUAUCAGGAAG |
| siRNA 3930 | 3930 | UUCCUGAUACCCCUCCACC | 9420 | GGUGGAGGGGUAUCAGGAA |
| siRNA 3931 | 3931 | UCCUGAUACCCCUCCACCA | 9421 | UGGUGGAGGGGUAUCAGGA |
| siRNA 3932 | 3932 | CCUGAUACCCCUCCACCAG | 9422 | CUGGUGGAGGGGUAUCAGG |
| siRNA 3933 | 3933 | CUGAUACCCCUCCACCAGU | 9423 | ACUGGUGGAGGGGUAUCAG |
| siRNA 3934 | 3934 | UGAUACCCCUCCACCAGUU | 9424 | AACUGGUGGAGGGGUAUCA |
| siRNA 3935 | 3935 | GAUACCCCUCCACCAGUUC | 9425 | GAACUGGUGGAGGGGUAUC |
| siRNA 3936 | 3936 | AUACCCCUCCACCAGUUCC | 9426 | GGAACUGGUGGAGGGGUAU |
| siRNA 3937 | 3937 | UACCCCUCCACCAGUUCCC | 9427 | GGGAACUGGUGGAGGGGUA |
| siRNA 3938 | 3938 | ACCCCUCCACCAGUUCCCC | 9428 | GGGGAACUGGUGGAGGGGU |
| siRNA 3939 | 3939 | CCCCUCCACCAGUUCCCCU | 9429 | AGGGGAACUGGUGGAGGGG |
| siRNA 3940 | 3940 | CCCUCCACCAGUUCCCCUU | 9430 | AAGGGGAACUGGUGGAGGG |
| siRNA 3941 | 3941 | CCUCCACCAGUUCCCCUUC | 9431 | GAAGGGGAACUGGUGGAGG |
| siRNA 3942 | 3942 | CUCCACCAGUUCCCCUUCG | 9432 | CGAAGGGGAACUGGUGGAG |
| siRNA 3943 | 3943 | UCCACCAGUUCCCCUUCGG | 9433 | CCGAAGGGGAACUGGUGGA |
| siRNA 3944 | 3944 | CCACCAGUUCCCCUUCGGC | 9434 | GCCGAAGGGGAACUGGUGG |
| siRNA 3945 | 3945 | CACCAGUUCCCCUUCGGCC | 9435 | GGCCGAAGGGGAACUGGUG |
| siRNA 3946 | 3946 | ACCAGUUCCCCUUCGGCCU | 9436 | AGGCCGAAGGGGAACUGGU |
| siRNA 3947 | 3947 | CCAGUUCCCCUUCGGCCUC | 9437 | GAGGCCGAAGGGGAACUGG |
| siRNA 3948 | 3948 | CAGUUCCCCUUCGGCCUCC | 9438 | GGAGGCCGAAGGGGAACUG |
| siRNA 3949 | 3949 | AGUUCCCCUUCGGCCUCCA | 9439 | UGGAGGCCGAAGGGGAACU |
| siRNA 3950 | 3950 | GUUCCCCUUCGGCCUCCAG | 9440 | CUGGAGGCCGAAGGGGAAC |
| siRNA 3951 | 3951 | UUCCCCUUCGGCCUCCAGA | 9441 | UCUGGAGGCCGAAGGGGAA |
| siRNA 3952 | 3952 | UCCCCUUCGGCCUCCAGAA | 9442 | UUCUGGAGGCCGAAGGGGA |
| siRNA 3953 | 3953 | CCCCUUCGGCCUCCAGAAC | 9443 | GUUCUGGAGGCCGAAGGGG |
| siRNA 3954 | 3954 | CCCUUCGGCCUCCAGAACA | 9444 | UGUUCUGGAGGCCGAAGGG |
| siRNA 3955 | 3955 | CCUUCGGCCUCCAGAACAC | 9445 | GUGUUCUGGAGGCCGAAGG |
| siRNA 3956 | 3956 | CUUCGGCCUCCAGAACACU | 9446 | AGUGUUCUGGAGGCCGAAG |
| siRNA 3957 | 3957 | UUCGGCCUCCAGAACACUU | 9447 | AAGUGUUCUGGAGGCCGAA |
| siRNA 3958 | 3958 | UCGGCCUCCAGAACACUUU | 9448 | AAAGUGUUCUGGAGGCCGA |
| siRNA 3959 | 3959 | CGGCCUCCAGAACACUUUA | 9449 | UAAAGUGUUCUGGAGGCCG |
| siRNA 3960 | 3960 | GGCCUCCAGAACACUUUAU | 9450 | AUAAAGUGUUCUGGAGGCC |
| siRNA 3961 | 3961 | GCCUCCAGAACACUUUAUA | 9451 | UAUAAAGUGUUCUGGAGGC |
| siRNA 3962 | 3962 | CCUCCAGAACACUUUAUAA | 9452 | UUAUAAAGUGUUCUGGAGG |
| siRNA 3963 | 3963 | CUCCAGAACACUUUAUAAA | 9453 | UUUAUAAAGUGUUCUGGAG |
| siRNA 3964 | 3964 | UCCAGAACACUUUAUAAAC | 9454 | GUUUAUAAAGUGUUCUGGA |
| siRNA 3965 | 3965 | CCAGAACACUUUAUAAACU | 9455 | AGUUUAUAAAGUGUUCUGG |
| siRNA 3966 | 3966 | CAGAACACUUUAUAAACUG | 9456 | CAGUUUAUAAAGUGUUCUG |
| siRNA 3967 | 3967 | AGAACACUUUAUAAACUGU | 9457 | ACAGUUUAUAAAGUGUUCU |
| siRNA 3968 | 3968 | GAACACUUUAUAAACUGUC | 9458 | GACAGUUUAUAAAGUGUUC |
| siRNA 3969 | 3969 | AACACUUUAUAAACUGUCC | 9459 | GGACAGUUUAUAAAGUGUU |
| siRNA 3970 | 3970 | ACACUUUAUAAACUGUCCA | 9460 | UGGACAGUUUAUAAAGUGU |
| siRNA 3971 | 3971 | CACUUUAUAAACUGUCCAU | 9461 | AUGGACAGUUUAUAAAGUG |
| siRNA 3972 | 3972 | ACUUUAUAAACUGUCCAUU | 9462 | AAUGGACAGUUUAUAAAGU |
| siRNA 3973 | 3973 | CUUUAUAAACUGUCCAUUU | 9463 | AAAUGGACAGUUUAUAAAG |
| siRNA 3974 | 3974 | UUUAUAAACUGUCCAUUUA | 9464 | UAAAUGGACAGUUUAUAAA |
| siRNA 3975 | 3975 | UUAUAAACUGUCCAUUUAA | 9465 | UUAAAUGGACAGUUUAUAA |
| siRNA 3976 | 3976 | UAUAAACUGUCCAUUUAAU | 9466 | AUUAAAUGGACAGUUUAUA |
| siRNA 3977 | 3977 | AUAAACUGUCCAUUUAAUC | 9467 | GAUUAAAUGGACAGUUUAU |
| siRNA 3978 | 3978 | UAAACUGUCCAUUUAAUCU | 9468 | AGAUUAAAUGGACAGUUUA |
| siRNA 3979 | 3979 | AAACUGUCCAUUUAAUCUU | 9469 | AAGAUUAAAUGGACAGUUU |
| siRNA 3980 | 3980 | AACUGUCCAUUUAAUCUUC | 9470 | GAAGAUUAAAUGGACAGUU |
| siRNA 3981 | 3981 | ACUGUCCAUUUAAUCUUCA | 9471 | UGAAGAUUAAAUGGACAGU |
| siRNA 3982 | 3982 | CUGUCCAUUUAAUCUUCAG | 9472 | CUGAAGAUUAAAUGGACAG |
| siRNA 3983 | 3983 | UGUCCAUUUAAUCUUCAGC | 9473 | GCUGAAGAUUAAAUGGACA |
| siRNA 3984 | 3984 | GUCCAUUUAAUCUUCAGCC | 9474 | GGCUGAAGAUUAAAUGGAC |
| siRNA 3985 | 3985 | UCCAUUUAAUCUUCAGCCA | 9475 | UGGCUGAAGAUUAAAUGGA |
| siRNA 3986 | 3986 | CCAUUUAAUCUUCAGCCAC | 9476 | GUGGCUGAAGAUUAAAUGG |
| siRNA 3987 | 3987 | CAUUUAAUCUUCAGCCACC | 9477 | GGUGGCUGAAGAUUAAAUG |
| siRNA 3988 | 3988 | AUUUAAUCUUCAGCCACCU | 9478 | AGGUGGCUGAAGAUUAAAU |
| siRNA 3989 | 3989 | UUUAAUCUUCAGCCACCUC | 9479 | GAGGUGGCUGAAGAUUAAA |
| siRNA 3990 | 3990 | UUAAUCUUCAGCCACCUCC | 9480 | GGAGGUGGCUGAAGAUUAA |
| siRNA 3991 | 3991 | UAAUCUUCAGCCACCUCCA | 9481 | UGGAGGUGGCUGAAGAUUA |
| siRNA 3992 | 3992 | AAUCUUCAGCCACCUCCAC | 9482 | GUGGAGGUGGCUGAAGAUU |
| siRNA 3993 | 3993 | AUCUUCAGCCACCUCCACU | 9483 | AGUGGAGGUGGCUGAAGAU |
| siRNA 3994 | 3994 | UCUUCAGCCACCUCCACUG | 9484 | CAGUGGAGGUGGCUGAAGA |
| siRNA 3995 | 3995 | CUUCAGCCACCUCCACUGG | 9485 | CCAGUGGAGGUGGCUGAAG |
| siRNA 3996 | 3996 | UUCAGCCACCUCCACUGGG | 9486 | CCCAGUGGAGGUGGCUGAA |
| siRNA 3997 | 3997 | UCAGCCACCUCCACUGGGG | 9487 | CCCCAGUGGAGGUGGCUGA |
| siRNA 3998 | 3998 | CAGCCACCUCCACUGGGGC | 9488 | GCCCCAGUGGAGGUGGCUG |
| siRNA 3999 | 3999 | AGCCACCUCCACUGGGGCA | 9489 | UGCCCCAGUGGAGGUGGCU |
| siRNA 4000 | 4000 | GCCACCUCCACUGGGGCAU | 9490 | AUGCCCCAGUGGAGGUGGC |
| siRNA 4001 | 4001 | CCACCUCCACUGGGGCAUC | 9491 | GAUGCCCCAGUGGAGGUGG |
| siRNA 4002 | 4002 | CACCUCCACUGGGGCAUCU | 9492 | AGAUGCCCCAGUGGAGGUG |
| siRNA 4003 | 4003 | ACCUCCACUGGGGCAUCUU | 9493 | AAGAUGCCCCAGUGGAGGU |
| siRNA 4004 | 4004 | CCUCCACUGGGGCAUCUUC | 9494 | GAAGAUGCCCCAGUGGAGG |
| siRNA 4005 | 4005 | CUCCACUGGGGCAUCUUCA | 9495 | UGAAGAUGCCCCAGUGGAG |
| siRNA 4006 | 4006 | UCCACUGGGGCAUCUUCAC | 9496 | GUGAAGAUGCCCCAGUGGA |
| siRNA 4007 | 4007 | CCACUGGGGCAUCUUCACA | 9497 | UGUGAAGAUGCCCCAGUGG |
| siRNA 4008 | 4008 | CACUGGGGCAUCUUCACAG | 9498 | CUGUGAAGAUGCCCCAGUG |
| siRNA 4009 | 4009 | ACUGGGGCAUCUUCACAGA | 9499 | UCUGUGAAGAUGCCCCAGU |
| siRNA 4010 | 4010 | CUGGGGCAUCUUCACAGAG | 9500 | CUCUGUGAAGAUGCCCCAG |
| siRNA 4011 | 4011 | UGGGGCAUCUUCACAGAGA | 9501 | UCUCUGUGAAGAUGCCCCA |
| siRNA 4012 | 4012 | GGGGCAUCUUCACAGAGAU | 9502 | AUCUCUGUGAAGAUGCCCC |
| siRNA 4013 | 4013 | GGGCAUCUUCACAGAGAUU | 9503 | AAUCUCUGUGAAGAUGCCC |
| siRNA 4014 | 4014 | GGCAUCUUCACAGAGAUUC | 9504 | GAAUCUCUGUGAAGAUGCC |
| siRNA 4015 | 4015 | GCAUCUUCACAGAGAUUCA | 9505 | UGAAUCUCUGUGAAGAUGC |
| siRNA 4016 | 4016 | CAUCUUCACAGAGAUUCAG | 9506 | CUGAAUCUCUGUGAAGAUG |
| siRNA 4017 | 4017 | AUCUUCACAGAGAUUCAGA | 9507 | UCUGAAUCUCUGUGAAGAU |
| siRNA 4018 | 4018 | UCUUCACAGAGAUUCAGAC | 9508 | GUCUGAAUCUCUGUGAAGA |
| siRNA 4019 | 4019 | CUUCACAGAGAUUCAGACU | 9509 | AGUCUGAAUCUCUGUGAAG |
| siRNA 4020 | 4020 | UUCACAGAGAUUCAGACUG | 9510 | CAGUCUGAAUCUCUGUGAA |
| siRNA 4021 | 4021 | UCACAGAGAUUCAGACUGG | 9511 | CCAGUCUGAAUCUCUGUGA |
| siRNA 4022 | 4022 | CACAGAGAUUCAGACUGGC | 9512 | GCCAGUCUGAAUCUCUGUG |
| siRNA 4023 | 4023 | ACAGAGAUUCAGACUGGCU | 9513 | AGCCAGUCUGAAUCUCUGU |
| siRNA 4024 | 4024 | CAGAGAUUCAGACUGGCUC | 9514 | GAGCCAGUCUGAAUCUCUG |
| siRNA 4025 | 4025 | AGAGAUUCAGACUGGCUCA | 9515 | UGAGCCAGUCUGAAUCUCU |
| siRNA 4026 | 4026 | GAGAUUCAGACUGGCUCAG | 9516 | CUGAGCCAGUCUGAAUCUC |
| siRNA 4027 | 4027 | AGAUUCAGACUGGCUCAGA | 9517 | UCUGAGCCAGUCUGAAUCU |
| siRNA 4028 | 4028 | GAUUCAGACUGGCUCAGAG | 9518 | CUCUGAGCCAGUCUGAAUC |
| siRNA 4029 | 4029 | AUUCAGACUGGCUCAGAGA | 9519 | UCUCUGAGCCAGUCUGAAU |
| siRNA 4030 | 4030 | UUCAGACUGGCUCAGAGAC | 9520 | GUCUCUGAGCCAGUCUGAA |
| siRNA 4031 | 4031 | UCAGACUGGCUCAGAGACA | 9521 | UGUCUCUGAGCCAGUCUGA |
| siRNA 4032 | 4032 | CAGACUGGCUCAGAGACAU | 9522 | AUGUCUCUGAGCCAGUCUG |
| siRNA 4033 | 4033 | AGACUGGCUCAGAGACAUU | 9523 | AAUGUCUCUGAGCCAGUCU |
| siRNA 4034 | 4034 | GACUGGCUCAGAGACAUUA | 9524 | UAAUGUCUCUGAGCCAGUC |
| siRNA 4035 | 4035 | ACUGGCUCAGAGACAUUAG | 9525 | CUAAUGUCUCUGAGCCAGU |
| siRNA 4036 | 4036 | CUGGCUCAGAGACAUUAGU | 9526 | ACUAAUGUCUCUGAGCCAG |
| siRNA 4037 | 4037 | UGGCUCAGAGACAUUAGUA | 9527 | UACUAAUGUCUCUGAGCCA |
| siRNA 4038 | 4038 | GGCUCAGAGACAUUAGUAC | 9528 | GUACUAAUGUCUCUGAGCC |
| siRNA 4039 | 4039 | GCUCAGAGACAUUAGUACG | 9529 | CGUACUAAUGUCUCUGAGC |
| siRNA 4040 | 4040 | CUCAGAGACAUUAGUACGU | 9530 | ACGUACUAAUGUCUCUGAG |
| siRNA 4041 | 4041 | UCAGAGACAUUAGUACGUG | 9531 | CACGUACUAAUGUCUCUGA |
| siRNA 4042 | 4042 | CAGAGACAUUAGUACGUGU | 9532 | ACACGUACUAAUGUCUCUG |
| siRNA 4043 | 4043 | AGAGACAUUAGUACGUGUC | 9533 | GACACGUACUAAUGUCUCU |
| siRNA 4044 | 4044 | GAGACAUUAGUACGUGUCC | 9534 | GGACACGUACUAAUGUCUC |
| siRNA 4045 | 4045 | AGACAUUAGUACGUGUCCA | 9535 | UGGACACGUACUAAUGUCU |
| siRNA 4046 | 4046 | GACAUUAGUACGUGUCCAA | 9536 | UUGGACACGUACUAAUGUC |
| siRNA 4047 | 4047 | ACAUUAGUACGUGUCCAAA | 9537 | UUUGGACACGUACUAAUGU |
| siRNA 4048 | 4048 | CAUUAGUACGUGUCCAAAU | 9538 | AUUUGGACACGUACUAAUG |
| siRNA 4049 | 4049 | AUUAGUACGUGUCCAAAUU | 9539 | AAUUUGGACACGUACUAAU |
| siRNA 4050 | 4050 | UUAGUACGUGUCCAAAUUC | 9540 | GAAUUUGGACACGUACUAA |
| siRNA 4051 | 4051 | UAGUACGUGUCCAAAUUCG | 9541 | CGAAUUUGGACACGUACUA |
| siRNA 4052 | 4052 | AGUACGUGUCCAAAUUCGC | 9542 | GCGAAUUUGGACACGUACU |
| siRNA 4053 | 4053 | GUACGUGUCCAAAUUCGCC | 9543 | GGCGAAUUUGGACACGUAC |
| siRNA 4054 | 4054 | UACGUGUCCAAAUUCGCCA | 9544 | UGGCGAAUUUGGACACGUA |
| siRNA 4055 | 4055 | ACGUGUCCAAAUUCGCCAA | 9545 | UUGGCGAAUUUGGACACGU |
| siRNA 4056 | 4056 | CGUGUCCAAAUUCGCCAAG | 9546 | CUUGGCGAAUUUGGACACG |
| siRNA 4057 | 4057 | GUGUCCAAAUUCGCCAAGC | 9547 | GCUUGGCGAAUUUGGACAC |
| siRNA 4058 | 4058 | UGUCCAAAUUCGCCAAGCA | 9548 | UGCUUGGCGAAUUUGGACA |
| siRNA 4059 | 4059 | GUCCAAAUUCGCCAAGCAC | 9549 | GUGCUUGGCGAAUUUGGAC |
| siRNA 4060 | 4060 | UCCAAAUUCGCCAAGCACU | 9550 | AGUGCUUGGCGAAUUUGGA |
| siRNA 4061 | 4061 | CCAAAUUCGCCAAGCACUC | 9551 | GAGUGCUUGGCGAAUUUGG |
| siRNA 4062 | 4062 | CAAAUUCGCCAAGCACUCC | 9552 | GGAGUGCUUGGCGAAUUUG |
| siRNA 4063 | 4063 | AAAUUCGCCAAGCACUCCU | 9553 | AGGAGUGCUUGGCGAAUUU |
| siRNA 4064 | 4064 | AAUUCGCCAAGCACUCCUC | 9554 | GAGGAGUGCUUGGCGAAUU |
| siRNA 4065 | 4065 | AUUCGCCAAGCACUCCUCC | 9555 | GGAGGAGUGCUUGGCGAAU |
| siRNA 4066 | 4066 | UUCGCCAAGCACUCCUCCU | 9556 | AGGAGGAGUGCUUGGCGAA |
| siRNA 4067 | 4067 | UCGCCAAGCACUCCUCCUA | 9557 | UAGGAGGAGUGCUUGGCGA |
| siRNA 4068 | 4068 | CGCCAAGCACUCCUCCUAG | 9558 | CUAGGAGGAGUGCUUGGCG |
| siRNA 4069 | 4069 | GCCAAGCACUCCUCCUAGC | 9559 | GCUAGGAGGAGUGCUUGGC |
| siRNA 4070 | 4070 | CCAAGCACUCCUCCUAGCA | 9560 | UGCUAGGAGGAGUGCUUGG |
| siRNA 4071 | 4071 | CAAGCACUCCUCCUAGCAC | 9561 | GUGCUAGGAGGAGUGCUUG |
| siRNA 4072 | 4072 | AAGCACUCCUCCUAGCACA | 9562 | UGUGCUAGGAGGAGUGCUU |
| siRNA 4073 | 4073 | AGCACUCCUCCUAGCACAC | 9563 | GUGUGCUAGGAGGAGUGCU |
| siRNA 4074 | 4074 | GCACUCCUCCUAGCACACC | 9564 | GGUGUGCUAGGAGGAGUGC |
| siRNA 4075 | 4075 | CACUCCUCCUAGCACACCC | 9565 | GGGUGUGCUAGGAGGAGUG |
| siRNA 4076 | 4076 | ACUCCUCCUAGCACACCCU | 9566 | AGGGUGUGCUAGGAGGAGU |
| siRNA 4077 | 4077 | CUCCUCCUAGCACACCCUC | 9567 | GAGGGUGUGCUAGGAGGAG |
| siRNA 4078 | 4078 | UCCUCCUAGCACACCCUCU | 9568 | AGAGGGUGUGCUAGGAGGA |
| siRNA 4079 | 4079 | CCUCCUAGCACACCCUCUC | 9569 | GAGAGGGUGUGCUAGGAGG |
| siRNA 4080 | 4080 | CUCCUAGCACACCCUCUCC | 9570 | GGAGAGGGUGUGCUAGGAG |
| siRNA 4081 | 4081 | UCCUAGCACACCCUCUCCA | 9571 | UGGAGAGGGUGUGCUAGGA |
| siRNA 4082 | 4082 | CCUAGCACACCCUCUCCAA | 9572 | UUGGAGAGGGUGUGCUAGG |
| siRNA 4083 | 4083 | CUAGCACACCCUCUCCAAG | 9573 | CUUGGAGAGGGUGUGCUAG |
| siRNA 4084 | 4084 | UAGCACACCCUCUCCAAGG | 9574 | CCUUGGAGAGGGUGUGCUA |
| siRNA 4085 | 4085 | AGCACACCCUCUCCAAGGG | 9575 | CCCUUGGAGAGGGUGUGCU |
| siRNA 4086 | 4086 | GCACACCCUCUCCAAGGGU | 9576 | ACCCUUGGAGAGGGUGUGC |
| siRNA 4087 | 4087 | CACACCCUCUCCAAGGGUA | 9577 | UACCCUUGGAGAGGGUGUG |
| siRNA 4088 | 4088 | ACACCCUCUCCAAGGGUAC | 9578 | GUACCCUUGGAGAGGGUGU |
| siRNA 4089 | 4089 | CACCCUCUCCAAGGGUACC | 9579 | GGUACCCUUGGAGAGGGUG |
| siRNA 4090 | 4090 | ACCCUCUCCAAGGGUACCG | 9580 | CGGUACCCUUGGAGAGGGU |
| siRNA 4091 | 4091 | CCCUCUCCAAGGGUACCGC | 9581 | GCGGUACCCUUGGAGAGGG |
| siRNA 4092 | 4092 | CCUCUCCAAGGGUACCGCG | 9582 | CGCGGUACCCUUGGAGAGG |
| siRNA 4093 | 4093 | CUCUCCAAGGGUACCGCGU | 9583 | ACGCGGUACCCUUGGAGAG |
| siRNA 4094 | 4094 | UCUCCAAGGGUACCGCGUC | 9584 | GACGCGGUACCCUUGGAGA |
| siRNA 4095 | 4095 | CUCCAAGGGUACCGCGUCG | 9585 | CGACGCGGUACCCUUGGAG |
| siRNA 4096 | 4096 | UCCAAGGGUACCGCGUCGA | 9586 | UCGACGCGGUACCCUUGGA |
| siRNA 4097 | 4097 | CCAAGGGUACCGCGUCGAU | 9587 | AUCGACGCGGUACCCUUGG |
| siRNA 4098 | 4098 | CAAGGGUACCGCGUCGAUG | 9588 | CAUCGACGCGGUACCCUUG |
| siRNA 4099 | 4099 | AAGGGUACCGCGUCGAUGC | 9589 | GCAUCGACGCGGUACCCUU |
| siRNA 4100 | 4100 | AGGGUACCGCGUCGAUGCU | 9590 | AGCAUCGACGCGGUACCCU |
| siRNA 4101 | 4101 | GGGUACCGCGUCGAUGCUA | 9591 | UAGCAUCGACGCGGUACCC |
| siRNA 4102 | 4102 | GGUACCGCGUCGAUGCUAU | 9592 | AUAGCAUCGACGCGGUACC |
| siRNA 4103 | 4103 | GUACCGCGUCGAUGCUAUG | 9593 | CAUAGCAUCGACGCGGUAC |
| siRNA 4104 | 4104 | UACCGCGUCGAUGCUAUGU | 9594 | ACAUAGCAUCGACGCGGUA |
| siRNA 4105 | 4105 | ACCGCGUCGAUGCUAUGUG | 9595 | CACAUAGCAUCGACGCGGU |
| siRNA 4106 | 4106 | CCGCGUCGAUGCUAUGUGC | 9596 | GCACAUAGCAUCGACGCGG |
| siRNA 4107 | 4107 | CGCGUCGAUGCUAUGUGCU | 9597 | AGCACAUAGCAUCGACGCG |
| siRNA 4108 | 4108 | GCGUCGAUGCUAUGUGCUC | 9598 | GAGCACAUAGCAUCGACGC |
| siRNA 4109 | 4109 | CGUCGAUGCUAUGUGCUCA | 9599 | UGAGCACAUAGCAUCGACG |
| siRNA 4110 | 4110 | GUCGAUGCUAUGUGCUCAG | 9600 | CUGAGCACAUAGCAUCGAC |
| siRNA 4111 | 4111 | UCGAUGCUAUGUGCUCAGU | 9601 | ACUGAGCACAUAGCAUCGA |
| siRNA 4112 | 4112 | CGAUGCUAUGUGCUCAGUU | 9602 | AACUGAGCACAUAGCAUCG |
| siRNA 4113 | 4113 | GAUGCUAUGUGCUCAGUUC | 9603 | GAACUGAGCACAUAGCAUC |
| siRNA 4114 | 4114 | AUGCUAUGUGCUCAGUUCU | 9604 | AGAACUGAGCACAUAGCAU |
| siRNA 4115 | 4115 | UGCUAUGUGCUCAGUUCUA | 9605 | UAGAACUGAGCACAUAGCA |
| siRNA 4116 | 4116 | GCUAUGUGCUCAGUUCUAG | 9606 | CUAGAACUGAGCACAUAGC |
| siRNA 4117 | 4117 | CUAUGUGCUCAGUUCUAGU | 9607 | ACUAGAACUGAGCACAUAG |
| siRNA 4118 | 4118 | UAUGUGCUCAGUUCUAGUC | 9608 | GACUAGAACUGAGCACAUA |
| siRNA 4119 | 4119 | AUGUGCUCAGUUCUAGUCA | 9609 | UGACUAGAACUGAGCACAU |
| siRNA 4120 | 4120 | UGUGCUCAGUUCUAGUCAG | 9610 | CUGACUAGAACUGAGCACA |
| siRNA 4121 | 4121 | GUGCUCAGUUCUAGUCAGA | 9611 | UCUGACUAGAACUGAGCAC |
| siRNA 4122 | 4122 | UGCUCAGUUCUAGUCAGAA | 9612 | UUCUGACUAGAACUGAGCA |
| siRNA 4123 | 4123 | GCUCAGUUCUAGUCAGAAU | 9613 | AUUCUGACUAGAACUGAGC |
| siRNA 4124 | 4124 | CUCAGUUCUAGUCAGAAUA | 9614 | UAUUCUGACUAGAACUGAG |
| siRNA 4125 | 4125 | UCAGUUCUAGUCAGAAUAA | 9615 | UUAUUCUGACUAGAACUGA |
| siRNA 4126 | 4126 | CAGUUCUAGUCAGAAUAAU | 9616 | AUUAUUCUGACUAGAACUG |
| siRNA 4127 | 4127 | AGUUCUAGUCAGAAUAAUC | 9617 | GAUUAUUCUGACUAGAACU |
| siRNA 4128 | 4128 | GUUCUAGUCAGAAUAAUCU | 9618 | AGAUUAUUCUGACUAGAAC |
| siRNA 4129 | 4129 | UUCUAGUCAGAAUAAUCUU | 9619 | AAGAUUAUUCUGACUAGAA |
| siRNA 4130 | 4130 | UCUAGUCAGAAUAAUCUUG | 9620 | CAAGAUUAUUCUGACUAGA |
| siRNA 4131 | 4131 | CUAGUCAGAAUAAUCUUGC | 9621 | GCAAGAUUAUUCUGACUAG |
| siRNA 4132 | 4132 | UAGUCAGAAUAAUCUUGCU | 9622 | AGCAAGAUUAUUCUGACUA |
| siRNA 4133 | 4133 | AGUCAGAAUAAUCUUGCUC | 9623 | GAGCAAGAUUAUUCUGACU |
| siRNA 4134 | 4134 | GUCAGAAUAAUCUUGCUCA | 9624 | UGAGCAAGAUUAUUCUGAC |
| siRNA 4135 | 4135 | UCAGAAUAAUCUUGCUCAU | 9625 | AUGAGCAAGAUUAUUCUGA |
| siRNA 4136 | 4136 | CAGAAUAAUCUUGCUCAUC | 9626 | GAUGAGCAAGAUUAUUCUG |
| siRNA 4137 | 4137 | AGAAUAAUCUUGCUCAUCC | 9627 | GGAUGAGCAAGAUUAUUCU |
| siRNA 4138 | 4138 | GAAUAAUCUUGCUCAUCCU | 9628 | AGGAUGAGCAAGAUUAUUC |
| siRNA 4139 | 4139 | AAUAAUCUUGCUCAUCCUC | 9629 | GAGGAUGAGCAAGAUUAUU |
| siRNA 4140 | 4140 | AUAAUCUUGCUCAUCCUCC | 9630 | GGAGGAUGAGCAAGAUUAU |
| siRNA 4141 | 4141 | UAAUCUUGCUCAUCCUCCA | 9631 | UGGAGGAUGAGCAAGAUUA |
| siRNA 4142 | 4142 | AAUCUUGCUCAUCCUCCAG | 9632 | CUGGAGGAUGAGCAAGAUU |
| siRNA 4143 | 4143 | AUCUUGCUCAUCCUCCAGC | 9633 | GCUGGAGGAUGAGCAAGAU |
| siRNA 4144 | 4144 | UCUUGCUCAUCCUCCAGCU | 9634 | AGCUGGAGGAUGAGCAAGA |
| siRNA 4145 | 4145 | CUUGCUCAUCCUCCAGCUC | 9635 | GAGCUGGAGGAUGAGCAAG |
| siRNA 4146 | 4146 | UUGCUCAUCCUCCAGCUCC | 9636 | GGAGCUGGAGGAUGAGCAA |
| siRNA 4147 | 4147 | UGCUCAUCCUCCAGCUCCC | 9637 | GGGAGCUGGAGGAUGAGCA |
| siRNA 4148 | 4148 | GCUCAUCCUCCAGCUCCCC | 9638 | GGGGAGCUGGAGGAUGAGC |
| siRNA 4149 | 4149 | CUCAUCCUCCAGCUCCCCC | 9639 | GGGGGAGCUGGAGGAUGAG |
| siRNA 4150 | 4150 | UCAUCCUCCAGCUCCCCCU | 9640 | AGGGGGAGCUGGAGGAUGA |
| siRNA 4151 | 4151 | CAUCCUCCAGCUCCCCCUG | 9641 | CAGGGGGAGCUGGAGGAUG |
| siRNA 4152 | 4152 | AUCCUCCAGCUCCCCCUGU | 9642 | ACAGGGGGAGCUGGAGGAU |
| siRNA 4153 | 4153 | UCCUCCAGCUCCCCCUGUU | 9643 | AACAGGGGGAGCUGGAGGA |
| siRNA 4154 | 4154 | CCUCCAGCUCCCCCUGUUC | 9644 | GAACAGGGGGAGCUGGAGG |
| siRNA 4155 | 4155 | CUCCAGCUCCCCCUGUUCC | 9645 | GGAACAGGGGGAGCUGGAG |
| siRNA 4156 | 4156 | UCCAGCUCCCCCUGUUCCA | 9646 | UGGAACAGGGGGAGCUGGA |
| siRNA 4157 | 4157 | CCAGCUCCCCCUGUUCCAC | 9647 | GUGGAACAGGGGGAGCUGG |
| siRNA 4158 | 4158 | CAGCUCCCCCUGUUCCACC | 9648 | GGUGGAACAGGGGGAGCUG |
| siRNA 4159 | 4159 | AGCUCCCCCUGUUCCACCA | 9649 | UGGUGGAACAGGGGGAGCU |
| siRNA 4160 | 4160 | GCUCCCCCUGUUCCACCAA | 9650 | UUGGUGGAACAGGGGGAGC |
| siRNA 4161 | 4161 | CUCCCCCUGUUCCACCAAG | 9651 | CUUGGUGGAACAGGGGGAG |
| siRNA 4162 | 4162 | UCCCCCUGUUCCACCAAGG | 9652 | CCUUGGUGGAACAGGGGGA |
| siRNA 4163 | 4163 | CCCCCUGUUCCACCAAGGC | 9653 | GCCUUGGUGGAACAGGGGG |
| siRNA 4164 | 4164 | CCCCUGUUCCACCAAGGCA | 9654 | UGCCUUGGUGGAACAGGGG |
| siRNA 4165 | 4165 | CCCUGUUCCACCAAGGCAG | 9655 | CUGCCUUGGUGGAACAGGG |
| siRNA 4166 | 4166 | CCUGUUCCACCAAGGCAGA | 9656 | UCUGCCUUGGUGGAACAGG |
| siRNA 4167 | 4167 | CUGUUCCACCAAGGCAGAA | 9657 | UUCUGCCUUGGUGGAACAG |
| siRNA 4168 | 4168 | UGUUCCACCAAGGCAGAAU | 9658 | AUUCUGCCUUGGUGGAACA |
| siRNA 4169 | 4169 | GUUCCACCAAGGCAGAAUU | 9659 | AAUUCUGCCUUGGUGGAAC |
| siRNA 4170 | 4170 | UUCCACCAAGGCAGAAUUC | 9660 | GAAUUCUGCCUUGGUGGAA |
| siRNA 4171 | 4171 | UCCACCAAGGCAGAAUUCA | 9661 | UGAAUUCUGCCUUGGUGGA |
| siRNA 4172 | 4172 | CCACCAAGGCAGAAUUCAA | 9662 | UUGAAUUCUGCCUUGGUGG |
| siRNA 4173 | 4173 | CACCAAGGCAGAAUUCAAG | 9663 | CUUGAAUUCUGCCUUGGUG |
| siRNA 4174 | 4174 | ACCAAGGCAGAAUUCAAGC | 9664 | GCUUGAAUUCUGCCUUGGU |
| siRNA 4175 | 4175 | CCAAGGCAGAAUUCAAGCC | 9665 | GGCUUGAAUUCUGCCUUGG |
| siRNA 4176 | 4176 | CAAGGCAGAAUUCAAGCCC | 9666 | GGGCUUGAAUUCUGCCUUG |
| siRNA 4177 | 4177 | AAGGCAGAAUUCAAGCCCU | 9667 | AGGGCUUGAAUUCUGCCUU |
| siRNA 4178 | 4178 | AGGCAGAAUUCAAGCCCUC | 9668 | GAGGGCUUGAAUUCUGCCU |
| siRNA 4179 | 4179 | GGCAGAAUUCAAGCCCUCA | 9669 | UGAGGGCUUGAAUUCUGCC |
| siRNA 4180 | 4180 | GCAGAAUUCAAGCCCUCAU | 9670 | AUGAGGGCUUGAAUUCUGC |
| siRNA 4181 | 4181 | CAGAAUUCAAGCCCUCAUC | 9671 | GAUGAGGGCUUGAAUUCUG |
| siRNA 4182 | 4182 | AGAAUUCAAGCCCUCAUCU | 9672 | AGAUGAGGGCUUGAAUUCU |
| siRNA 4183 | 4183 | GAAUUCAAGCCCUCAUCUG | 9673 | CAGAUGAGGGCUUGAAUUC |
| siRNA 4184 | 4184 | AAUUCAAGCCCUCAUCUGC | 9674 | GCAGAUGAGGGCUUGAAUU |
| siRNA 4185 | 4185 | AUUCAAGCCCUCAUCUGCC | 9675 | GGCAGAUGAGGGCUUGAAU |
| siRNA 4186 | 4186 | UUCAAGCCCUCAUCUGCCA | 9676 | UGGCAGAUGAGGGCUUGAA |
| siRNA 4187 | 4187 | UCAAGCCCUCAUCUGCCAA | 9677 | UUGGCAGAUGAGGGCUUGA |
| siRNA 4188 | 4188 | CAAGCCCUCAUCUGCCAAA | 9678 | UUUGGCAGAUGAGGGCUUG |
| siRNA 4189 | 4189 | AAGCCCUCAUCUGCCAAAA | 9679 | UUUUGGCAGAUGAGGGCUU |
| siRNA 4190 | 4190 | AGCCCUCAUCUGCCAAAAC | 9680 | GUUUUGGCAGAUGAGGGCU |
| siRNA 4191 | 4191 | GCCCUCAUCUGCCAAAACU | 9681 | AGUUUUGGCAGAUGAGGGC |
| siRNA 4192 | 4192 | CCCUCAUCUGCCAAAACUG | 9682 | CAGUUUUGGCAGAUGAGGG |
| siRNA 4193 | 4193 | CCUCAUCUGCCAAAACUGC | 9683 | GCAGUUUUGGCAGAUGAGG |
| siRNA 4194 | 4194 | CUCAUCUGCCAAAACUGCC | 9684 | GGCAGUUUUGGCAGAUGAG |
| siRNA 4195 | 4195 | UCAUCUGCCAAAACUGCCA | 9685 | UGGCAGUUUUGGCAGAUGA |
| siRNA 4196 | 4196 | CAUCUGCCAAAACUGCCAC | 9686 | GUGGCAGUUUUGGCAGAUG |
| siRNA 4197 | 4197 | AUCUGCCAAAACUGCCACC | 9687 | GGUGGCAGUUUUGGCAGAU |
| siRNA 4198 | 4198 | UCUGCCAAAACUGCCACCA | 9688 | UGGUGGCAGUUUUGGCAGA |
| siRNA 4199 | 4199 | CUGCCAAAACUGCCACCAA | 9689 | UUGGUGGCAGUUUUGGCAG |
| siRNA 4200 | 4200 | UGCCAAAACUGCCACCAAA | 9690 | UUUGGUGGCAGUUUUGGCA |
| siRNA 4201 | 4201 | GCCAAAACUGCCACCAAAG | 9691 | CUUUGGUGGCAGUUUUGGC |
| siRNA 4202 | 4202 | CCAAAACUGCCACCAAAGA | 9692 | UCUUUGGUGGCAGUUUUGG |
| siRNA 4203 | 4203 | CAAAACUGCCACCAAAGAC | 9693 | GUCUUUGGUGGCAGUUUUG |
| siRNA 4204 | 4204 | AAAACUGCCACCAAAGACU | 9694 | AGUCUUUGGUGGCAGUUUU |
| siRNA 4205 | 4205 | AAACUGCCACCAAAGACUU | 9695 | AAGUCUUUGGUGGCAGUUU |
| siRNA 4206 | 4206 | AACUGCCACCAAAGACUUA | 9696 | UAAGUCUUUGGUGGCAGUU |
| siRNA 4207 | 4207 | ACUGCCACCAAAGACUUAC | 9697 | GUAAGUCUUUGGUGGCAGU |
| siRNA 4208 | 4208 | CUGCCACCAAAGACUUACA | 9698 | UGUAAGUCUUUGGUGGCAG |
| siRNA 4209 | 4209 | UGCCACCAAAGACUUACAA | 9699 | UUGUAAGUCUUUGGUGGCA |
| siRNA 4210 | 4210 | GCCACCAAAGACUUACAAA | 9700 | UUUGUAAGUCUUUGGUGGC |
| siRNA 4211 | 4211 | CCACCAAAGACUUACAAAC | 9701 | GUUUGUAAGUCUUUGGUGG |
| siRNA 4212 | 4212 | CACCAAAGACUUACAAACG | 9702 | CGUUUGUAAGUCUUUGGUG |
| siRNA 4213 | 4213 | ACCAAAGACUUACAAACGG | 9703 | CCGUUUGUAAGUCUUUGGU |
| siRNA 4214 | 4214 | CCAAAGACUUACAAACGGG | 9704 | CCCGUUUGUAAGUCUUUGG |
| siRNA 4215 | 4215 | CAAAGACUUACAAACGGGA | 9705 | UCCCGUUUGUAAGUCUUUG |
| siRNA 4216 | 4216 | AAAGACUUACAAACGGGAG | 9706 | CUCCCGUUUGUAAGUCUUU |
| siRNA 4217 | 4217 | AAGACUUACAAACGGGAGC | 9707 | GCUCCCGUUUGUAAGUCUU |
| siRNA 4218 | 4218 | AGACUUACAAACGGGAGCU | 9708 | AGCUCCCGUUUGUAAGUCU |
| siRNA 4219 | 4219 | GACUUACAAACGGGAGCUU | 9709 | AAGCUCCCGUUUGUAAGUC |
| siRNA 4220 | 4220 | ACUUACAAACGGGAGCUUU | 9710 | AAAGCUCCCGUUUGUAAGU |
| siRNA 4221 | 4221 | CUUACAAACGGGAGCUUUC | 9711 | GAAAGCUCCCGUUUGUAAG |
| siRNA 4222 | 4222 | UUACAAACGGGAGCUUUCG | 9712 | CGAAAGCUCCCGUUUGUAA |
| siRNA 4223 | 4223 | UACAAACGGGAGCUUUCGC | 9713 | GCGAAAGCUCCCGUUUGUA |
| siRNA 4224 | 4224 | ACAAACGGGAGCUUUCGCA | 9714 | UGCGAAAGCUCCCGUUUGU |
| siRNA 4225 | 4225 | CAAACGGGAGCUUUCGCAC | 9715 | GUGCGAAAGCUCCCGUUUG |
| siRNA 4226 | 4226 | AAACGGGAGCUUUCGCACC | 9716 | GGUGCGAAAGCUCCCGUUU |
| siRNA 4227 | 4227 | AACGGGAGCUUUCGCACCC | 9717 | GGGUGCGAAAGCUCCCGUU |
| siRNA 4228 | 4228 | ACGGGAGCUUUCGCACCCC | 9718 | GGGGUGCGAAAGCUCCCGU |
| siRNA 4229 | 4229 | CGGGAGCUUUCGCACCCCC | 9719 | GGGGGUGCGAAAGCUCCCG |
| siRNA 4230 | 4230 | GGGAGCUUUCGCACCCCCC | 9720 | GGGGGGUGCGAAAGCUCCC |
| siRNA 4231 | 4231 | GGAGCUUUCGCACCCCCCA | 9721 | UGGGGGGUGCGAAAGCUCC |
| siRNA 4232 | 4232 | GAGCUUUCGCACCCCCCAU | 9722 | AUGGGGGGUGCGAAAGCUC |
| siRNA 4233 | 4233 | AGCUUUCGCACCCCCCAUU | 9723 | AAUGGGGGGUGCGAAAGCU |
| siRNA 4234 | 4234 | GCUUUCGCACCCCCCAUUG | 9724 | CAAUGGGGGGUGCGAAAGC |
| siRNA 4235 | 4235 | CUUUCGCACCCCCCAUUGU | 9725 | ACAAUGGGGGGUGCGAAAG |
| siRNA 4236 | 4236 | UUUCGCACCCCCCAUUGUA | 9726 | UACAAUGGGGGGUGCGAAA |
| siRNA 4237 | 4237 | UUCGCACCCCCCAUUGUAC | 9727 | GUACAAUGGGGGGUGCGAA |
| siRNA 4238 | 4238 | UCGCACCCCCCAUUGUACA | 9728 | UGUACAAUGGGGGGUGCGA |
| siRNA 4239 | 4239 | CGCACCCCCCAUUGUACAG | 9729 | CUGUACAAUGGGGGGUGCG |
| siRNA 4240 | 4240 | GCACCCCCCAUUGUACAGA | 9730 | UCUGUACAAUGGGGGGUGC |
| siRNA 4241 | 4241 | CACCCCCCAUUGUACAGAC | 9731 | GUCUGUACAAUGGGGGGUG |
| siRNA 4242 | 4242 | ACCCCCCAUUGUACAGACU | 9732 | AGUCUGUACAAUGGGGGGU |
| siRNA 4243 | 4243 | CCCCCCAUUGUACAGACUG | 9733 | CAGUCUGUACAAUGGGGGG |
| siRNA 4244 | 4244 | CCCCCAUUGUACAGACUGC | 9734 | GCAGUCUGUACAAUGGGGG |
| siRNA 4245 | 4245 | CCCCAUUGUACAGACUGCC | 9735 | GGCAGUCUGUACAAUGGGG |
| siRNA 4246 | 4246 | CCCAUUGUACAGACUGCCU | 9736 | AGGCAGUCUGUACAAUGGG |
| siRNA 4247 | 4247 | CCAUUGUACAGACUGCCUU | 9737 | AAGGCAGUCUGUACAAUGG |
| siRNA 4248 | 4248 | CAUUGUACAGACUGCCUUU | 9738 | AAAGGCAGUCUGUACAAUG |
| siRNA 4249 | 4249 | AUUGUACAGACUGCCUUUG | 9739 | CAAAGGCAGUCUGUACAAU |
| siRNA 4250 | 4250 | UUGUACAGACUGCCUUUGC | 9740 | GCAAAGGCAGUCUGUACAA |
| siRNA 4251 | 4251 | UGUACAGACUGCCUUUGCU | 9741 | AGCAAAGGCAGUCUGUACA |
| siRNA 4252 | 4252 | GUACAGACUGCCUUUGCUA | 9742 | UAGCAAAGGCAGUCUGUAC |
| siRNA 4253 | 4253 | UACAGACUGCCUUUGCUAG | 9743 | CUAGCAAAGGCAGUCUGUA |
| siRNA 4254 | 4254 | ACAGACUGCCUUUGCUAGA | 9744 | UCUAGCAAAGGCAGUCUGU |
| siRNA 4255 | 4255 | CAGACUGCCUUUGCUAGAA | 9745 | UUCUAGCAAAGGCAGUCUG |
| siRNA 4256 | 4256 | AGACUGCCUUUGCUAGAAA | 9746 | UUUCUAGCAAAGGCAGUCU |
| siRNA 4257 | 4257 | GACUGCCUUUGCUAGAAAA | 9747 | UUUUCUAGCAAAGGCAGUC |
| siRNA 4258 | 4258 | ACUGCCUUUGCUAGAAAAU | 9748 | AUUUUCUAGCAAAGGCAGU |
| siRNA 4259 | 4259 | CUGCCUUUGCUAGAAAAUG | 9749 | CAUUUUCUAGCAAAGGCAG |
| siRNA 4260 | 4260 | UGCCUUUGCUAGAAAAUGC | 9750 | GCAUUUUCUAGCAAAGGCA |
| siRNA 4261 | 4261 | GCCUUUGCUAGAAAAUGCA | 9751 | UGCAUUUUCUAGCAAAGGC |
| siRNA 4262 | 4262 | CCUUUGCUAGAAAAUGCAG | 9752 | CUGCAUUUUCUAGCAAAGG |
| siRNA 4263 | 4263 | CUUUGCUAGAAAAUGCAGA | 9753 | UCUGCAUUUUCUAGCAAAG |
| siRNA 4264 | 4264 | UUUGCUAGAAAAUGCAGAA | 9754 | UUCUGCAUUUUCUAGCAAA |
| siRNA 4265 | 4265 | UUGCUAGAAAAUGCAGAAA | 9755 | UUUCUGCAUUUUCUAGCAA |
| siRNA 4266 | 4266 | UGCUAGAAAAUGCAGAAAC | 9756 | GUUUCUGCAUUUUCUAGCA |
| siRNA 4267 | 4267 | GCUAGAAAAUGCAGAAACU | 9757 | AGUUUCUGCAUUUUCUAGC |
| siRNA 4268 | 4268 | CUAGAAAAUGCAGAAACUC | 9758 | GAGUUUCUGCAUUUUCUAG |
| siRNA 4269 | 4269 | UAGAAAAUGCAGAAACUCC | 9759 | GGAGUUUCUGCAUUUUCUA |
| siRNA 4270 | 4270 | AGAAAAUGCAGAAACUCCC | 9760 | GGGAGUUUCUGCAUUUUCU |
| siRNA 4271 | 4271 | GAAAAUGCAGAAACUCCCC | 9761 | GGGGAGUUUCUGCAUUUUC |
| siRNA 4272 | 4272 | AAAAUGCAGAAACUCCCCA | 9762 | UGGGGAGUUUCUGCAUUUU |
| siRNA 4273 | 4273 | AAAUGCAGAAACUCCCCAA | 9763 | UUGGGGAGUUUCUGCAUUU |
| siRNA 4274 | 4274 | AAUGCAGAAACUCCCCAAU | 9764 | AUUGGGGAGUUUCUGCAUU |
| siRNA 4275 | 4275 | AUGCAGAAACUCCCCAAUG | 9765 | CAUUGGGGAGUUUCUGCAU |
| siRNA 4276 | 4276 | UGCAGAAACUCCCCAAUGA | 9766 | UCAUUGGGGAGUUUCUGCA |
| siRNA 4277 | 4277 | GCAGAAACUCCCCAAUGAC | 9767 | GUCAUUGGGGAGUUUCUGC |
| siRNA 4278 | 4278 | CAGAAACUCCCCAAUGACC | 9768 | GGUCAUUGGGGAGUUUCUG |
| siRNA 4279 | 4279 | AGAAACUCCCCAAUGACCU | 9769 | AGGUCAUUGGGGAGUUUCU |
| siRNA 4280 | 4280 | GAAACUCCCCAAUGACCUU | 9770 | AAGGUCAUUGGGGAGUUUC |
| siRNA 4281 | 4281 | AAACUCCCCAAUGACCUUA | 9771 | UAAGGUCAUUGGGGAGUUU |
| siRNA 4282 | 4282 | AACUCCCCAAUGACCUUAG | 9772 | CUAAGGUCAUUGGGGAGUU |
| siRNA 4283 | 4283 | ACUCCCCAAUGACCUUAGC | 9773 | GCUAAGGUCAUUGGGGAGU |
| siRNA 4284 | 4284 | CUCCCCAAUGACCUUAGCC | 9774 | GGCUAAGGUCAUUGGGGAG |
| siRNA 4285 | 4285 | UCCCCAAUGACCUUAGCCA | 9775 | UGGCUAAGGUCAUUGGGGA |
| siRNA 4286 | 4286 | CCCCAAUGACCUUAGCCAU | 9776 | AUGGCUAAGGUCAUUGGGG |
| siRNA 4287 | 4287 | CCCAAUGACCUUAGCCAUA | 9777 | UAUGGCUAAGGUCAUUGGG |
| siRNA 4288 | 4288 | CCAAUGACCUUAGCCAUAU | 9778 | AUAUGGCUAAGGUCAUUGG |
| siRNA 4289 | 4289 | CAAUGACCUUAGCCAUAUG | 9779 | CAUAUGGCUAAGGUCAUUG |
| siRNA 4290 | 4290 | AAUGACCUUAGCCAUAUGU | 9780 | ACAUAUGGCUAAGGUCAUU |
| siRNA 4291 | 4291 | AUGACCUUAGCCAUAUGUA | 9781 | UACAUAUGGCUAAGGUCAU |
| siRNA 4292 | 4292 | UGACCUUAGCCAUAUGUAG | 9782 | CUACAUAUGGCUAAGGUCA |
| siRNA 4293 | 4293 | GACCUUAGCCAUAUGUAGU | 9783 | ACUACAUAUGGCUAAGGUC |
| siRNA 4294 | 4294 | ACCUUAGCCAUAUGUAGUC | 9784 | GACUACAUAUGGCUAAGGU |
| siRNA 4295 | 4295 | CCUUAGCCAUAUGUAGUCA | 9785 | UGACUACAUAUGGCUAAGG |
| siRNA 4296 | 4296 | CUUAGCCAUAUGUAGUCAU | 9786 | AUGACUACAUAUGGCUAAG |
| siRNA 4297 | 4297 | UUAGCCAUAUGUAGUCAUU | 9787 | AAUGACUACAUAUGGCUAA |
| siRNA 4298 | 4298 | UAGCCAUAUGUAGUCAUUG | 9788 | CAAUGACUACAUAUGGCUA |
| siRNA 4299 | 4299 | AGCCAUAUGUAGUCAUUGA | 9789 | UCAAUGACUACAUAUGGCU |
| siRNA 4300 | 4300 | GCCAUAUGUAGUCAUUGAC | 9790 | GUCAAUGACUACAUAUGGC |
| siRNA 4301 | 4301 | CCAUAUGUAGUCAUUGACA | 9791 | UGUCAAUGACUACAUAUGG |
| siRNA 4302 | 4302 | CAUAUGUAGUCAUUGACAC | 9792 | GUGUCAAUGACUACAUAUG |
| siRNA 4303 | 4303 | AUAUGUAGUCAUUGACACU | 9793 | AGUGUCAAUGACUACAUAU |
| siRNA 4304 | 4304 | UAUGUAGUCAUUGACACUG | 9794 | CAGUGUCAAUGACUACAUA |
| siRNA 4305 | 4305 | AUGUAGUCAUUGACACUGG | 9795 | CCAGUGUCAAUGACUACAU |
| siRNA 4306 | 4306 | UGUAGUCAUUGACACUGGA | 9796 | UCCAGUGUCAAUGACUACA |
| siRNA 4307 | 4307 | GUAGUCAUUGACACUGGAA | 9797 | UUCCAGUGUCAAUGACUAC |
| siRNA 4308 | 4308 | UAGUCAUUGACACUGGAAU | 9798 | AUUCCAGUGUCAAUGACUA |
| siRNA 4309 | 4309 | AGUCAUUGACACUGGAAUG | 9799 | CAUUCCAGUGUCAAUGACU |
| siRNA 4310 | 4310 | GUCAUUGACACUGGAAUGG | 9800 | CCAUUCCAGUGUCAAUGAC |
| siRNA 4311 | 4311 | UCAUUGACACUGGAAUGGU | 9801 | ACCAUUCCAGUGUCAAUGA |
| siRNA 4312 | 4312 | CAUUGACACUGGAAUGGUA | 9802 | UACCAUUCCAGUGUCAAUG |
| siRNA 4313 | 4313 | AUUGACACUGGAAUGGUAU | 9803 | AUACCAUUCCAGUGUCAAU |
| siRNA 4314 | 4314 | UUGACACUGGAAUGGUAUU | 9804 | AAUACCAUUCCAGUGUCAA |
| siRNA 4315 | 4315 | UGACACUGGAAUGGUAUUU | 9805 | AAAUACCAUUCCAGUGUCA |
| siRNA 4316 | 4316 | GACACUGGAAUGGUAUUUG | 9806 | CAAAUACCAUUCCAGUGUC |
| siRNA 4317 | 4317 | ACACUGGAAUGGUAUUUGU | 9807 | ACAAAUACCAUUCCAGUGU |
| siRNA 4318 | 4318 | CACUGGAAUGGUAUUUGUA | 9808 | UACAAAUACCAUUCCAGUG |
| siRNA 4319 | 4319 | ACUGGAAUGGUAUUUGUAA | 9809 | UUACAAAUACCAUUCCAGU |
| siRNA 4320 | 4320 | CUGGAAUGGUAUUUGUAAA | 9810 | UUUACAAAUACCAUUCCAG |
| siRNA 4321 | 4321 | UGGAAUGGUAUUUGUAAAG | 9811 | CUUUACAAAUACCAUUCCA |
| siRNA 4322 | 4322 | GGAAUGGUAUUUGUAAAGU | 9812 | ACUUUACAAAUACCAUUCC |
| siRNA 4323 | 4323 | GAAUGGUAUUUGUAAAGUU | 9813 | AACUUUACAAAUACCAUUC |
| siRNA 4324 | 4324 | AAUGGUAUUUGUAAAGUUU | 9814 | AAACUUUACAAAUACCAUU |
| siRNA 4325 | 4325 | AUGGUAUUUGUAAAGUUUU | 9815 | AAAACUUUACAAAUACCAU |
| siRNA 4326 | 4326 | UGGUAUUUGUAAAGUUUUU | 9816 | AAAAACUUUACAAAUACCA |
| siRNA 4327 | 4327 | GGUAUUUGUAAAGUUUUUU | 9817 | AAAAAACUUUACAAAUACC |
| siRNA 4328 | 4328 | GUAUUUGUAAAGUUUUUUU | 9818 | AAAAAAACUUUACAAAUAC |
| siRNA 4329 | 4329 | UAUUUGUAAAGUUUUUUUU | 9819 | AAAAAAAACUUUACAAAUA |
| siRNA 4330 | 4330 | AUUUGUAAAGUUUUUUUUU | 9820 | AAAAAAAAACUUUACAAAU |
| siRNA 4331 | 4331 | UUUGUAAAGUUUUUUUUUU | 9821 | AAAAAAAAAACUUUACAAA |
| siRNA 4332 | 4332 | UUGUAAAGUUUUUUUUUUA | 9822 | UAAAAAAAAAACUUUACAA |
| siRNA 4333 | 4333 | UGUAAAGUUUUUUUUUUAA | 9823 | UUAAAAAAAAAACUUUACA |
| siRNA 4334 | 4334 | GUAAAGUUUUUUUUUUAAU | 9824 | AUUAAAAAAAAAACUUUAC |
| siRNA 4335 | 4335 | UAAAGUUUUUUUUUUAAUU | 9825 | AAUUAAAAAAAAAACUUUA |
| siRNA 4336 | 4336 | AAAGUUUUUUUUUUAAUUU | 9826 | AAAUUAAAAAAAAAACUUU |
| siRNA 4337 | 4337 | AAGUUUUUUUUUUAAUUUA | 9827 | UAAAUUAAAAAAAAAACUU |
| siRNA 4338 | 4338 | AGUUUUUUUUUUAAUUUAU | 9828 | AUAAAUUAAAAAAAAAACU |
| siRNA 4339 | 4339 | GUUUUUUUUUUAAUUUAUU | 9829 | AAUAAAUUAAAAAAAAAAC |
| siRNA 4340 | 4340 | UUUUUUUUUUAAUUUAUUC | 9830 | GAAUAAAUUAAAAAAAAAA |
| siRNA 4341 | 4341 | UUUUUUUUUAAUUUAUUCA | 9831 | UGAAUAAAUUAAAAAAAAA |
| siRNA 4342 | 4342 | UUUUUUUUAAUUUAUUCAA | 9832 | UUGAAUAAAUUAAAAAAAA |
| siRNA 4343 | 4343 | UUUUUUUAAUUUAUUCAAA | 9833 | UUUGAAUAAAUUAAAAAAA |
| siRNA 4344 | 4344 | UUUUUUAAUUUAUUCAAAA | 9834 | UUUUGAAUAAAUUAAAAAA |
| siRNA 4345 | 4345 | UUUUUAAUUUAUUCAAAAA | 9835 | UUUUUGAAUAAAUUAAAAA |
| siRNA 4346 | 4346 | UUUUAAUUUAUUCAAAAAA | 9836 | UUUUUUGAAUAAAUUAAAA |
| siRNA 4347 | 4347 | UUUAAUUUAUUCAAAAAAA | 9837 | UUUUUUUGAAUAAAUUAAA |
| siRNA 4348 | 4348 | UUAAUUUAUUCAAAAAAAG | 9838 | CUUUUUUUGAAUAAAUUAA |
| siRNA 4349 | 4349 | UAAUUUAUUCAAAAAAAGA | 9839 | UCUUUUUUUGAAUAAAUUA |
| siRNA 4350 | 4350 | AAUUUAUUCAAAAAAAGAC | 9840 | GUCUUUUUUUGAAUAAAUU |
| siRNA 4351 | 4351 | AUUUAUUCAAAAAAAGACA | 9841 | UGUCUUUUUUUGAAUAAAU |
| siRNA 4352 | 4352 | UUUAUUCAAAAAAAGACAU | 9842 | AUGUCUUUUUUUGAAUAAA |
| siRNA 4353 | 4353 | UUAUUCAAAAAAAGACAUA | 9843 | UAUGUCUUUUUUUGAAUAA |
| siRNA 4354 | 4354 | UAUUCAAAAAAAGACAUAG | 9844 | CUAUGUCUUUUUUUGAAUA |
| siRNA 4355 | 4355 | AUUCAAAAAAAGACAUAGU | 9845 | ACUAUGUCUUUUUUUGAAU |
| siRNA 4356 | 4356 | UUCAAAAAAAGACAUAGUA | 9846 | UACUAUGUCUUUUUUUGAA |
| siRNA 4357 | 4357 | UCAAAAAAAGACAUAGUAU | 9847 | AUACUAUGUCUUUUUUUGA |
| siRNA 4358 | 4358 | CAAAAAAAGACAUAGUAUU | 9848 | AAUACUAUGUCUUUUUUUG |
| siRNA 4359 | 4359 | AAAAAAAGACAUAGUAUUU | 9849 | AAAUACUAUGUCUUUUUUU |
| siRNA 4360 | 4360 | AAAAAAGACAUAGUAUUUU | 9850 | AAAAUACUAUGUCUUUUUU |
| siRNA 4361 | 4361 | AAAAAGACAUAGUAUUUUA | 9851 | UAAAAUACUAUGUCUUUUU |
| siRNA 4362 | 4362 | AAAAGACAUAGUAUUUUAG | 9852 | CUAAAAUACUAUGUCUUUU |
| siRNA 4363 | 4363 | AAAGACAUAGUAUUUUAGU | 9853 | ACUAAAAUACUAUGUCUUU |
| siRNA 4364 | 4364 | AAGACAUAGUAUUUUAGUA | 9854 | UACUAAAAUACUAUGUCUU |
| siRNA 4365 | 4365 | AGACAUAGUAUUUUAGUAC | 9855 | GUACUAAAAUACUAUGUCU |
| siRNA 4366 | 4366 | GACAUAGUAUUUUAGUACU | 9856 | AGUACUAAAAUACUAUGUC |
| siRNA 4367 | 4367 | ACAUAGUAUUUUAGUACUU | 9857 | AAGUACUAAAAUACUAUGU |
| siRNA 4368 | 4368 | CAUAGUAUUUUAGUACUUU | 9858 | AAAGUACUAAAAUACUAUG |
| siRNA 4369 | 4369 | AUAGUAUUUUAGUACUUUU | 9859 | AAAAGUACUAAAAUACUAU |
| siRNA 4370 | 4370 | UAGUAUUUUAGUACUUUUU | 9860 | AAAAAGUACUAAAAUACUA |
| siRNA 4371 | 4371 | AGUAUUUUAGUACUUUUUA | 9861 | UAAAAAGUACUAAAAUACU |
| siRNA 4372 | 4372 | GUAUUUUAGUACUUUUUAC | 9862 | GUAAAAAGUACUAAAAUAC |
| siRNA 4373 | 4373 | UAUUUUAGUACUUUUUACA | 9863 | UGUAAAAAGUACUAAAAUA |
| siRNA 4374 | 4374 | AUUUUAGUACUUUUUACAA | 9864 | UUGUAAAAAGUACUAAAAU |
| siRNA 4375 | 4375 | UUUUAGUACUUUUUACAAA | 9865 | UUUGUAAAAAGUACUAAAA |
| siRNA 4376 | 4376 | UUUAGUACUUUUUACAAAU | 9866 | AUUUGUAAAAAGUACUAAA |
| siRNA 4377 | 4377 | UUAGUACUUUUUACAAAUA | 9867 | UAUUUGUAAAAAGUACUAA |
| siRNA 4378 | 4378 | UAGUACUUUUUACAAAUAA | 9868 | UUAUUUGUAAAAAGUACUA |
| siRNA 4379 | 4379 | AGUACUUUUUACAAAUAAU | 9869 | AUUAUUUGUAAAAAGUACU |
| siRNA 4380 | 4380 | GUACUUUUUACAAAUAAUG | 9870 | CAUUAUUUGUAAAAAGUAC |
| siRNA 4381 | 4381 | UACUUUUUACAAAUAAUGC | 9871 | GCAUUAUUUGUAAAAAGUA |
| siRNA 4382 | 4382 | ACUUUUUACAAAUAAUGCU | 9872 | AGCAUUAUUUGUAAAAAGU |
| siRNA 4383 | 4383 | CUUUUUACAAAUAAUGCUC | 9873 | GAGCAUUAUUUGUAAAAAG |
| siRNA 4384 | 4384 | UUUUUACAAAUAAUGCUCU | 9874 | AGAGCAUUAUUUGUAAAAA |
| siRNA 4385 | 4385 | UUUUACAAAUAAUGCUCUU | 9875 | AAGAGCAUUAUUUGUAAAA |
| siRNA 4386 | 4386 | UUUACAAAUAAUGCUCUUA | 9876 | UAAGAGCAUUAUUUGUAAA |
| siRNA 4387 | 4387 | UUACAAAUAAUGCUCUUAC | 9877 | GUAAGAGCAUUAUUUGUAA |
| siRNA 4388 | 4388 | UACAAAUAAUGCUCUUACA | 9878 | UGUAAGAGCAUUAUUUGUA |
| siRNA 4389 | 4389 | ACAAAUAAUGCUCUUACAA | 9879 | UUGUAAGAGCAUUAUUUGU |
| siRNA 4390 | 4390 | CAAAUAAUGCUCUUACAAA | 9880 | UUUGUAAGAGCAUUAUUUG |
| siRNA 4391 | 4391 | AAAUAAUGCUCUUACAAAA | 9881 | UUUUGUAAGAGCAUUAUUU |
| siRNA 4392 | 4392 | AAUAAUGCUCUUACAAAAA | 9882 | UUUUUGUAAGAGCAUUAUU |
| siRNA 4393 | 4393 | AUAAUGCUCUUACAAAAAU | 9883 | AUUUUUGUAAGAGCAUUAU |
| siRNA 4394 | 4394 | UAAUGCUCUUACAAAAAUG | 9884 | CAUUUUUGUAAGAGCAUUA |
| siRNA 4395 | 4395 | AAUGCUCUUACAAAAAUGC | 9885 | GCAUUUUUGUAAGAGCAUU |
| siRNA 4396 | 4396 | AUGCUCUUACAAAAAUGCU | 9886 | AGCAUUUUUGUAAGAGCAU |
| siRNA 4397 | 4397 | UGCUCUUACAAAAAUGCUA | 9887 | UAGCAUUUUUGUAAGAGCA |
| siRNA 4398 | 4398 | GCUCUUACAAAAAUGCUAC | 9888 | GUAGCAUUUUUGUAAGAGC |
| siRNA 4399 | 4399 | CUCUUACAAAAAUGCUACU | 9889 | AGUAGCAUUUUUGUAAGAG |
| siRNA 4400 | 4400 | UCUUACAAAAAUGCUACUG | 9890 | CAGUAGCAUUUUUGUAAGA |
| siRNA 4401 | 4401 | CUUACAAAAAUGCUACUGA | 9891 | UCAGUAGCAUUUUUGUAAG |
| siRNA 4402 | 4402 | UUACAAAAAUGCUACUGAU | 9892 | AUCAGUAGCAUUUUUGUAA |
| siRNA 4403 | 4403 | UACAAAAAUGCUACUGAUC | 9893 | GAUCAGUAGCAUUUUUGUA |
| siRNA 4404 | 4404 | ACAAAAAUGCUACUGAUCA | 9894 | UGAUCAGUAGCAUUUUUGU |
| siRNA 4405 | 4405 | CAAAAAUGCUACUGAUCAA | 9895 | UUGAUCAGUAGCAUUUUUG |
| siRNA 4406 | 4406 | AAAAAUGCUACUGAUCAAA | 9896 | UUUGAUCAGUAGCAUUUUU |
| siRNA 4407 | 4407 | AAAAUGCUACUGAUCAAAU | 9897 | AUUUGAUCAGUAGCAUUUU |
| siRNA 4408 | 4408 | AAAUGCUACUGAUCAAAUA | 9898 | UAUUUGAUCAGUAGCAUUU |
| siRNA 4409 | 4409 | AAUGCUACUGAUCAAAUAA | 9899 | UUAUUUGAUCAGUAGCAUU |
| siRNA 4410 | 4410 | AUGCUACUGAUCAAAUAAG | 9900 | CUUAUUUGAUCAGUAGCAU |
| siRNA 4411 | 4411 | UGCUACUGAUCAAAUAAGC | 9901 | GCUUAUUUGAUCAGUAGCA |
| siRNA 4412 | 4412 | GCUACUGAUCAAAUAAGCU | 9902 | AGCUUAUUUGAUCAGUAGC |
| siRNA 4413 | 4413 | CUACUGAUCAAAUAAGCUU | 9903 | AAGCUUAUUUGAUCAGUAG |
| siRNA 4414 | 4414 | UACUGAUCAAAUAAGCUUU | 9904 | AAAGCUUAUUUGAUCAGUA |
| siRNA 4415 | 4415 | ACUGAUCAAAUAAGCUUUU | 9905 | AAAAGCUUAUUUGAUCAGU |
| siRNA 4416 | 4416 | CUGAUCAAAUAAGCUUUUA | 9906 | UAAAAGCUUAUUUGAUCAG |
| siRNA 4417 | 4417 | UGAUCAAAUAAGCUUUUAA | 9907 | UUAAAAGCUUAUUUGAUCA |
| siRNA 4418 | 4418 | GAUCAAAUAAGCUUUUAAG | 9908 | CUUAAAAGCUUAUUUGAUC |
| siRNA 4419 | 4419 | AUCAAAUAAGCUUUUAAGA | 9909 | UCUUAAAAGCUUAUUUGAU |
| siRNA 4420 | 4420 | UCAAAUAAGCUUUUAAGAA | 9910 | UUCUUAAAAGCUUAUUUGA |
| siRNA 4421 | 4421 | CAAAUAAGCUUUUAAGAAU | 9911 | AUUCUUAAAAGCUUAUUUG |
| siRNA 4422 | 4422 | AAAUAAGCUUUUAAGAAUU | 9912 | AAUUCUUAAAAGCUUAUUU |
| siRNA 4423 | 4423 | AAUAAGCUUUUAAGAAUUG | 9913 | CAAUUCUUAAAAGCUUAUU |
| siRNA 4424 | 4424 | AUAAGCUUUUAAGAAUUGG | 9914 | CCAAUUCUUAAAAGCUUAU |
| siRNA 4425 | 4425 | UAAGCUUUUAAGAAUUGGA | 9915 | UCCAAUUCUUAAAAGCUUA |
| siRNA 4426 | 4426 | AAGCUUUUAAGAAUUGGAA | 9916 | UUCCAAUUCUUAAAAGCUU |
| siRNA 4427 | 4427 | AGCUUUUAAGAAUUGGAAA | 9917 | UUUCCAAUUCUUAAAAGCU |
| siRNA 4428 | 4428 | GCUUUUAAGAAUUGGAAAA | 9918 | UUUUCCAAUUCUUAAAAGC |
| siRNA 4429 | 4429 | CUUUUAAGAAUUGGAAAAA | 9919 | UUUUUCCAAUUCUUAAAAG |
| siRNA 4430 | 4430 | UUUUAAGAAUUGGAAAAAU | 9920 | AUUUUUCCAAUUCUUAAAA |
| siRNA 4431 | 4431 | UUUAAGAAUUGGAAAAAUA | 9921 | UAUUUUUCCAAUUCUUAAA |
| siRNA 4432 | 4432 | UUAAGAAUUGGAAAAAUAA | 9922 | UUAUUUUUCCAAUUCUUAA |
| siRNA 4433 | 4433 | UAAGAAUUGGAAAAAUAAA | 9923 | UUUAUUUUUCCAAUUCUUA |
| siRNA 4434 | 4434 | AAGAAUUGGAAAAAUAAAA | 9924 | UUUUAUUUUUCCAAUUCUU |
| siRNA 4435 | 4435 | AGAAUUGGAAAAAUAAAAA | 9925 | UUUUUAUUUUUCCAAUUCU |
| siRNA 4436 | 4436 | GAAUUGGAAAAAUAAAAAU | 9926 | AUUUUUAUUUUUCCAAUUC |
| siRNA 4437 | 4437 | AAUUGGAAAAAUAAAAAUA | 9927 | UAUUUUUAUUUUUCCAAUU |
| siRNA 4438 | 4438 | AUUGGAAAAAUAAAAAUAC | 9928 | GUAUUUUUAUUUUUCCAAU |
| siRNA 4439 | 4439 | UUGGAAAAAUAAAAAUACA | 9929 | UGUAUUUUUAUUUUUCCAA |
| siRNA 4440 | 4440 | UGGAAAAAUAAAAAUACAA | 9930 | UUGUAUUUUUAUUUUUCCA |
| siRNA 4441 | 4441 | GGAAAAAUAAAAAUACAAA | 9931 | UUUGUAUUUUUAUUUUUCC |
| siRNA 4442 | 4442 | GAAAAAUAAAAAUACAAAA | 9932 | UUUUGUAUUUUUAUUUUUC |
| siRNA 4443 | 4443 | AAAAAUAAAAAUACAAAAG | 9933 | CUUUUGUAUUUUUAUUUUU |
| siRNA 4444 | 4444 | AAAAUAAAAAUACAAAAGU | 9934 | ACUUUUGUAUUUUUAUUUU |
| siRNA 4445 | 4445 | AAAUAAAAAUACAAAAGUC | 9935 | GACUUUUGUAUUUUUAUUU |
| siRNA 4446 | 4446 | AAUAAAAAUACAAAAGUCC | 9936 | GGACUUUUGUAUUUUUAUU |
| siRNA 4447 | 4447 | AUAAAAAUACAAAAGUCCU | 9937 | AGGACUUUUGUAUUUUUAU |
| siRNA 4448 | 4448 | UAAAAAUACAAAAGUCCUU | 9938 | AAGGACUUUUGUAUUUUUA |
| siRNA 4449 | 4449 | AAAAAUACAAAAGUCCUUC | 9939 | GAAGGACUUUUGUAUUUUU |
| siRNA 4450 | 4450 | AAAAUACAAAAGUCCUUCA | 9940 | UGAAGGACUUUUGUAUUUU |
| siRNA 4451 | 4451 | AAAUACAAAAGUCCUUCAC | 9941 | GUGAAGGACUUUUGUAUUU |
| siRNA 4452 | 4452 | AAUACAAAAGUCCUUCACC | 9942 | GGUGAAGGACUUUUGUAUU |
| siRNA 4453 | 4453 | AUACAAAAGUCCUUCACCA | 9943 | UGGUGAAGGACUUUUGUAU |
| siRNA 4454 | 4454 | UACAAAAGUCCUUCACCAU | 9944 | AUGGUGAAGGACUUUUGUA |
| siRNA 4455 | 4455 | ACAAAAGUCCUUCACCAUU | 9945 | AAUGGUGAAGGACUUUUGU |
| siRNA 4456 | 4456 | CAAAAGUCCUUCACCAUUA | 9946 | UAAUGGUGAAGGACUUUUG |
| siRNA 4457 | 4457 | AAAAGUCCUUCACCAUUAU | 9947 | AUAAUGGUGAAGGACUUUU |
| siRNA 4458 | 4458 | AAAGUCCUUCACCAUUAUC | 9948 | GAUAAUGGUGAAGGACUUU |
| siRNA 4459 | 4459 | AAGUCCUUCACCAUUAUCC | 9949 | GGAUAAUGGUGAAGGACUU |
| siRNA 4460 | 4460 | AGUCCUUCACCAUUAUCCU | 9950 | AGGAUAAUGGUGAAGGACU |
| siRNA 4461 | 4461 | GUCCUUCACCAUUAUCCUC | 9951 | GAGGAUAAUGGUGAAGGAC |
| siRNA 4462 | 4462 | UCCUUCACCAUUAUCCUCA | 9952 | UGAGGAUAAUGGUGAAGGA |
| siRNA 4463 | 4463 | CCUUCACCAUUAUCCUCAG | 9953 | CUGAGGAUAAUGGUGAAGG |
| siRNA 4464 | 4464 | CUUCACCAUUAUCCUCAGG | 9954 | CCUGAGGAUAAUGGUGAAG |
| siRNA 4465 | 4465 | UUCACCAUUAUCCUCAGGU | 9955 | ACCUGAGGAUAAUGGUGAA |
| siRNA 4466 | 4466 | UCACCAUUAUCCUCAGGUG | 9956 | CACCUGAGGAUAAUGGUGA |
| siRNA 4467 | 4467 | CACCAUUAUCCUCAGGUGA | 9957 | UCACCUGAGGAUAAUGGUG |
| siRNA 4468 | 4468 | ACCAUUAUCCUCAGGUGAU | 9958 | AUCACCUGAGGAUAAUGGU |
| siRNA 4469 | 4469 | CCAUUAUCCUCAGGUGAUC | 9959 | GAUCACCUGAGGAUAAUGG |
| siRNA 4470 | 4470 | CAUUAUCCUCAGGUGAUCA | 9960 | UGAUCACCUGAGGAUAAUG |
| siRNA 4471 | 4471 | AUUAUCCUCAGGUGAUCAG | 9961 | CUGAUCACCUGAGGAUAAU |
| siRNA 4472 | 4472 | UUAUCCUCAGGUGAUCAGU | 9962 | ACUGAUCACCUGAGGAUAA |
| siRNA 4473 | 4473 | UAUCCUCAGGUGAUCAGUA | 9963 | UACUGAUCACCUGAGGAUA |
| siRNA 4474 | 4474 | AUCCUCAGGUGAUCAGUAG | 9964 | CUACUGAUCACCUGAGGAU |
| siRNA 4475 | 4475 | UCCUCAGGUGAUCAGUAGC | 9965 | GCUACUGAUCACCUGAGGA |
| siRNA 4476 | 4476 | CCUCAGGUGAUCAGUAGCA | 9966 | UGCUACUGAUCACCUGAGG |
| siRNA 4477 | 4477 | CUCAGGUGAUCAGUAGCAU | 9967 | AUGCUACUGAUCACCUGAG |
| siRNA 4478 | 4478 | UCAGGUGAUCAGUAGCAUU | 9968 | AAUGCUACUGAUCACCUGA |
| siRNA 4479 | 4479 | CAGGUGAUCAGUAGCAUUG | 9969 | CAAUGCUACUGAUCACCUG |
| siRNA 4480 | 4480 | AGGUGAUCAGUAGCAUUGC | 9970 | GCAAUGCUACUGAUCACCU |
| siRNA 4481 | 4481 | GGUGAUCAGUAGCAUUGCC | 9971 | GGCAAUGCUACUGAUCACC |
| siRNA 4482 | 4482 | GUGAUCAGUAGCAUUGCCU | 9972 | AGGCAAUGCUACUGAUCAC |
| siRNA 4483 | 4483 | UGAUCAGUAGCAUUGCCUU | 9973 | AAGGCAAUGCUACUGAUCA |
| siRNA 4484 | 4484 | GAUCAGUAGCAUUGCCUUG | 9974 | CAAGGCAAUGCUACUGAUC |
| siRNA 4485 | 4485 | AUCAGUAGCAUUGCCUUGU | 9975 | ACAAGGCAAUGCUACUGAU |
| siRNA 4486 | 4486 | UCAGUAGCAUUGCCUUGUC | 9976 | GACAAGGCAAUGCUACUGA |
| siRNA 4487 | 4487 | CAGUAGCAUUGCCUUGUCU | 9977 | AGACAAGGCAAUGCUACUG |
| siRNA 4488 | 4488 | AGUAGCAUUGCCUUGUCUU | 9978 | AAGACAAGGCAAUGCUACU |
| siRNA 4489 | 4489 | GUAGCAUUGCCUUGUCUUG | 9979 | CAAGACAAGGCAAUGCUAC |
| siRNA 4490 | 4490 | UAGCAUUGCCUUGUCUUGG | 9980 | CCAAGACAAGGCAAUGCUA |
| siRNA 4491 | 4491 | AGCAUUGCCUUGUCUUGGA | 9981 | UCCAAGACAAGGCAAUGCU |
| siRNA 4492 | 4492 | GCAUUGCCUUGUCUUGGAU | 9982 | AUCCAAGACAAGGCAAUGC |
| siRNA 4493 | 4493 | CAUUGCCUUGUCUUGGAUC | 9983 | GAUCCAAGACAAGGCAAUG |
| siRNA 4494 | 4494 | AUUGCCUUGUCUUGGAUCC | 9984 | GGAUCCAAGACAAGGCAAU |
| siRNA 4495 | 4495 | UUGCCUUGUCUUGGAUCCU | 9985 | AGGAUCCAAGACAAGGCAA |
| siRNA 4496 | 4496 | UGCCUUGUCUUGGAUCCUC | 9986 | GAGGAUCCAAGACAAGGCA |
| siRNA 4497 | 4497 | GCCUUGUCUUGGAUCCUCA | 9987 | UGAGGAUCCAAGACAAGGC |
| siRNA 4498 | 4498 | CCUUGUCUUGGAUCCUCAG | 9988 | CUGAGGAUCCAAGACAAGG |
| siRNA 4499 | 4499 | CUUGUCUUGGAUCCUCAGU | 9989 | ACUGAGGAUCCAAGACAAG |
| siRNA 4500 | 4500 | UUGUCUUGGAUCCUCAGUG | 9990 | CACUGAGGAUCCAAGACAA |
| siRNA 4501 | 4501 | UGUCUUGGAUCCUCAGUGC | 9991 | GCACUGAGGAUCCAAGACA |
| siRNA 4502 | 4502 | GUCUUGGAUCCUCAGUGCU | 9992 | AGCACUGAGGAUCCAAGAC |
| siRNA 4503 | 4503 | UCUUGGAUCCUCAGUGCUG | 9993 | CAGCACUGAGGAUCCAAGA |
| siRNA 4504 | 4504 | CUUGGAUCCUCAGUGCUGC | 9994 | GCAGCACUGAGGAUCCAAG |
| siRNA 4505 | 4505 | UUGGAUCCUCAGUGCUGCC | 9995 | GGCAGCACUGAGGAUCCAA |
| siRNA 4506 | 4506 | UGGAUCCUCAGUGCUGCCA | 9996 | UGGCAGCACUGAGGAUCCA |
| siRNA 4507 | 4507 | GGAUCCUCAGUGCUGCCAA | 9997 | UUGGCAGCACUGAGGAUCC |
| siRNA 4508 | 4508 | GAUCCUCAGUGCUGCCAAA | 9998 | UUUGGCAGCACUGAGGAUC |
| siRNA 4509 | 4509 | AUCCUCAGUGCUGCCAAAA | 9999 | UUUUGGCAGCACUGAGGAU |
| siRNA 4510 | 4510 | UCCUCAGUGCUGCCAAAAG | 10000 | CUUUUGGCAGCACUGAGGA |
| siRNA 4511 | 4511 | CCUCAGUGCUGCCAAAAGG | 10001 | CCUUUUGGCAGCACUGAGG |
| siRNA 4512 | 4512 | CUCAGUGCUGCCAAAAGGC | 10002 | GCCUUUUGGCAGCACUGAG |
| siRNA 4513 | 4513 | UCAGUGCUGCCAAAAGGCC | 10003 | GGCCUUUUGGCAGCACUGA |
| siRNA 4514 | 4514 | CAGUGCUGCCAAAAGGCCA | 10004 | UGGCCUUUUGGCAGCACUG |
| siRNA 4515 | 4515 | AGUGCUGCCAAAAGGCCAG | 10005 | CUGGCCUUUUGGCAGCACU |
| siRNA 4516 | 4516 | GUGCUGCCAAAAGGCCAGU | 10006 | ACUGGCCUUUUGGCAGCAC |
| siRNA 4517 | 4517 | UGCUGCCAAAAGGCCAGUA | 10007 | UACUGGCCUUUUGGCAGCA |
| siRNA 4518 | 4518 | GCUGCCAAAAGGCCAGUAU | 10008 | AUACUGGCCUUUUGGCAGC |
| siRNA 4519 | 4519 | CUGCCAAAAGGCCAGUAUA | 10009 | UAUACUGGCCUUUUGGCAG |
| siRNA 4520 | 4520 | UGCCAAAAGGCCAGUAUAA | 10010 | UUAUACUGGCCUUUUGGCA |
| siRNA 4521 | 4521 | GCCAAAAGGCCAGUAUAAA | 10011 | UUUAUACUGGCCUUUUGGC |
| siRNA 4522 | 4522 | CCAAAAGGCCAGUAUAAAG | 10012 | CUUUAUACUGGCCUUUUGG |
| siRNA 4523 | 4523 | CAAAAGGCCAGUAUAAAGA | 10013 | UCUUUAUACUGGCCUUUUG |
| siRNA 4524 | 4524 | AAAAGGCCAGUAUAAAGAA | 10014 | UUCUUUAUACUGGCCUUUU |
| siRNA 4525 | 4525 | AAAGGCCAGUAUAAAGAAU | 10015 | AUUCUUUAUACUGGCCUUU |
| siRNA 4526 | 4526 | AAGGCCAGUAUAAAGAAUU | 10016 | AAUUCUUUAUACUGGCCUU |
| siRNA 4527 | 4527 | AGGCCAGUAUAAAGAAUUU | 10017 | AAAUUCUUUAUACUGGCCU |
| siRNA 4528 | 4528 | GGCCAGUAUAAAGAAUUUA | 10018 | UAAAUUCUUUAUACUGGCC |
| siRNA 4529 | 4529 | GCCAGUAUAAAGAAUUUAU | 10019 | AUAAAUUCUUUAUACUGGC |
| siRNA 4530 | 4530 | CCAGUAUAAAGAAUUUAUA | 10020 | UAUAAAUUCUUUAUACUGG |
| siRNA 4531 | 4531 | CAGUAUAAAGAAUUUAUAU | 10021 | AUAUAAAUUCUUUAUACUG |
| siRNA 4532 | 4532 | AGUAUAAAGAAUUUAUAUU | 10022 | AAUAUAAAUUCUUUAUACU |
| siRNA 4533 | 4533 | GUAUAAAGAAUUUAUAUUU | 10023 | AAAUAUAAAUUCUUUAUAC |
| siRNA 4534 | 4534 | UAUAAAGAAUUUAUAUUUG | 10024 | CAAAUAUAAAUUCUUUAUA |
| siRNA 4535 | 4535 | AUAAAGAAUUUAUAUUUGC | 10025 | GCAAAUAUAAAUUCUUUAU |
| siRNA 4536 | 4536 | UAAAGAAUUUAUAUUUGCA | 10026 | UGCAAAUAUAAAUUCUUUA |
| siRNA 4537 | 4537 | AAAGAAUUUAUAUUUGCAC | 10027 | GUGCAAAUAUAAAUUCUUU |
| siRNA 4538 | 4538 | AAGAAUUUAUAUUUGCACU | 10028 | AGUGCAAAUAUAAAUUCUU |
| siRNA 4539 | 4539 | AGAAUUUAUAUUUGCACUG | 10029 | CAGUGCAAAUAUAAAUUCU |
| siRNA 4540 | 4540 | GAAUUUAUAUUUGCACUGU | 10030 | ACAGUGCAAAUAUAAAUUC |
| siRNA 4541 | 4541 | AAUUUAUAUUUGCACUGUA | 10031 | UACAGUGCAAAUAUAAAUU |
| siRNA 4542 | 4542 | AUUUAUAUUUGCACUGUAA | 10032 | UUACAGUGCAAAUAUAAAU |
| siRNA 4543 | 4543 | UUUAUAUUUGCACUGUAAA | 10033 | UUUACAGUGCAAAUAUAAA |
| siRNA 4544 | 4544 | UUAUAUUUGCACUGUAAAC | 10034 | GUUUACAGUGCAAAUAUAA |
| siRNA 4545 | 4545 | UAUAUUUGCACUGUAAACU | 10035 | AGUUUACAGUGCAAAUAUA |
| siRNA 4546 | 4546 | AUAUUUGCACUGUAAACUC | 10036 | GAGUUUACAGUGCAAAUAU |
| siRNA 4547 | 4547 | UAUUUGCACUGUAAACUCU | 10037 | AGAGUUUACAGUGCAAAUA |
| siRNA 4548 | 4548 | AUUUGCACUGUAAACUCUG | 10038 | CAGAGUUUACAGUGCAAAU |
| siRNA 4549 | 4549 | UUUGCACUGUAAACUCUGC | 10039 | GCAGAGUUUACAGUGCAAA |
| siRNA 4550 | 4550 | UUGCACUGUAAACUCUGCA | 10040 | UGCAGAGUUUACAGUGCAA |
| siRNA 4551 | 4551 | UGCACUGUAAACUCUGCAA | 10041 | UUGCAGAGUUUACAGUGCA |
| siRNA 4552 | 4552 | GCACUGUAAACUCUGCAAA | 10042 | UUUGCAGAGUUUACAGUGC |
| siRNA 4553 | 4553 | CACUGUAAACUCUGCAAAA | 10043 | UUUUGCAGAGUUUACAGUG |
| siRNA 4554 | 4554 | ACUGUAAACUCUGCAAAAA | 10044 | UUUUUGCAGAGUUUACAGU |
| siRNA 4555 | 4555 | CUGUAAACUCUGCAAAAAU | 10045 | AUUUUUGCAGAGUUUACAG |
| siRNA 4556 | 4556 | UGUAAACUCUGCAAAAAUA | 10046 | UAUUUUUGCAGAGUUUACA |
| siRNA 4557 | 4557 | GUAAACUCUGCAAAAAUAU | 10047 | AUAUUUUUGCAGAGUUUAC |
| siRNA 4558 | 4558 | UAAACUCUGCAAAAAUAUG | 10048 | CAUAUUUUUGCAGAGUUUA |
| siRNA 4559 | 4559 | AAACUCUGCAAAAAUAUGG | 10049 | CCAUAUUUUUGCAGAGUUU |
| siRNA 4560 | 4560 | AACUCUGCAAAAAUAUGGU | 10050 | ACCAUAUUUUUGCAGAGUU |
| siRNA 4561 | 4561 | ACUCUGCAAAAAUAUGGUU | 10051 | AACCAUAUUUUUGCAGAGU |
| siRNA 4562 | 4562 | CUCUGCAAAAAUAUGGUUU | 10052 | AAACCAUAUUUUUGCAGAG |
| siRNA 4563 | 4563 | UCUGCAAAAAUAUGGUUUA | 10053 | UAAACCAUAUUUUUGCAGA |
| siRNA 4564 | 4564 | CUGCAAAAAUAUGGUUUAA | 10054 | UUAAACCAUAUUUUUGCAG |
| siRNA 4565 | 4565 | UGCAAAAAUAUGGUUUAAA | 10055 | UUUAAACCAUAUUUUUGCA |
| siRNA 4566 | 4566 | GCAAAAAUAUGGUUUAAAG | 10056 | CUUUAAACCAUAUUUUUGC |
| siRNA 4567 | 4567 | CAAAAAUAUGGUUUAAAGU | 10057 | ACUUUAAACCAUAUUUUUG |
| siRNA 4568 | 4568 | AAAAAUAUGGUUUAAAGUG | 10058 | CACUUUAAACCAUAUUUUU |
| siRNA 4569 | 4569 | AAAAUAUGGUUUAAAGUGA | 10059 | UCACUUUAAACCAUAUUUU |
| siRNA 4570 | 4570 | AAAUAUGGUUUAAAGUGAC | 10060 | GUCACUUUAAACCAUAUUU |
| siRNA 4571 | 4571 | AAUAUGGUUUAAAGUGACA | 10061 | UGUCACUUUAAACCAUAUU |
| siRNA 4572 | 4572 | AUAUGGUUUAAAGUGACAU | 10062 | AUGUCACUUUAAACCAUAU |
| siRNA 4573 | 4573 | UAUGGUUUAAAGUGACAUG | 10063 | CAUGUCACUUUAAACCAUA |
| siRNA 4574 | 4574 | AUGGUUUAAAGUGACAUGA | 10064 | UCAUGUCACUUUAAACCAU |
| siRNA 4575 | 4575 | UGGUUUAAAGUGACAUGAU | 10065 | AUCAUGUCACUUUAAACCA |
| siRNA 4576 | 4576 | GGUUUAAAGUGACAUGAUU | 10066 | AAUCAUGUCACUUUAAACC |
| siRNA 4577 | 4577 | GUUUAAAGUGACAUGAUUG | 10067 | CAAUCAUGUCACUUUAAAC |
| siRNA 4578 | 4578 | UUUAAAGUGACAUGAUUGC | 10068 | GCAAUCAUGUCACUUUAAA |
| siRNA 4579 | 4579 | UUAAAGUGACAUGAUUGCA | 10069 | UGCAAUCAUGUCACUUUAA |
| siRNA 4580 | 4580 | UAAAGUGACAUGAUUGCAC | 10070 | GUGCAAUCAUGUCACUUUA |
| siRNA 4581 | 4581 | AAAGUGACAUGAUUGCACU | 10071 | AGUGCAAUCAUGUCACUUU |
| siRNA 4582 | 4582 | AAGUGACAUGAUUGCACUG | 10072 | CAGUGCAAUCAUGUCACUU |
| siRNA 4583 | 4583 | AGUGACAUGAUUGCACUGA | 10073 | UCAGUGCAAUCAUGUCACU |
| siRNA 4584 | 4584 | GUGACAUGAUUGCACUGAA | 10074 | UUCAGUGCAAUCAUGUCAC |
| siRNA 4585 | 4585 | UGACAUGAUUGCACUGAAA | 10075 | UUUCAGUGCAAUCAUGUCA |
| siRNA 4586 | 4586 | GACAUGAUUGCACUGAAAA | 10076 | UUUUCAGUGCAAUCAUGUC |
| siRNA 4587 | 4587 | ACAUGAUUGCACUGAAAAG | 10077 | CUUUUCAGUGCAAUCAUGU |
| siRNA 4588 | 4588 | CAUGAUUGCACUGAAAAGG | 10078 | CCUUUUCAGUGCAAUCAUG |
| siRNA 4589 | 4589 | AUGAUUGCACUGAAAAGGG | 10079 | CCCUUUUCAGUGCAAUCAU |
| siRNA 4590 | 4590 | UGAUUGCACUGAAAAGGGA | 10080 | UCCCUUUUCAGUGCAAUCA |
| siRNA 4591 | 4591 | GAUUGCACUGAAAAGGGAU | 10081 | AUCCCUUUUCAGUGCAAUC |
| siRNA 4592 | 4592 | AUUGCACUGAAAAGGGAUA | 10082 | UAUCCCUUUUCAGUGCAAU |
| siRNA 4593 | 4593 | UUGCACUGAAAAGGGAUAG | 10083 | CUAUCCCUUUUCAGUGCAA |
| siRNA 4594 | 4594 | UGCACUGAAAAGGGAUAGU | 10084 | ACUAUCCCUUUUCAGUGCA |
| siRNA 4595 | 4595 | GCACUGAAAAGGGAUAGUG | 10085 | CACUAUCCCUUUUCAGUGC |
| siRNA 4596 | 4596 | CACUGAAAAGGGAUAGUGC | 10086 | GCACUAUCCCUUUUCAGUG |
| siRNA 4597 | 4597 | ACUGAAAAGGGAUAGUGCU | 10087 | AGCACUAUCCCUUUUCAGU |
| siRNA 4598 | 4598 | CUGAAAAGGGAUAGUGCUU | 10088 | AAGCACUAUCCCUUUUCAG |
| siRNA 4599 | 4599 | UGAAAAGGGAUAGUGCUUU | 10089 | AAAGCACUAUCCCUUUUCA |
| siRNA 4600 | 4600 | GAAAAGGGAUAGUGCUUUU | 10090 | AAAAGCACUAUCCCUUUUC |
| siRNA 4601 | 4601 | AAAAGGGAUAGUGCUUUUG | 10091 | CAAAAGCACUAUCCCUUUU |
| siRNA 4602 | 4602 | AAAGGGAUAGUGCUUUUGU | 10092 | ACAAAAGCACUAUCCCUUU |
| siRNA 4603 | 4603 | AAGGGAUAGUGCUUUUGUG | 10093 | CACAAAAGCACUAUCCCUU |
| siRNA 4604 | 4604 | AGGGAUAGUGCUUUUGUGA | 10094 | UCACAAAAGCACUAUCCCU |
| siRNA 4605 | 4605 | GGGAUAGUGCUUUUGUGAA | 10095 | UUCACAAAAGCACUAUCCC |
| siRNA 4606 | 4606 | GGAUAGUGCUUUUGUGAAA | 10096 | UUUCACAAAAGCACUAUCC |
| siRNA 4607 | 4607 | GAUAGUGCUUUUGUGAAAU | 10097 | AUUUCACAAAAGCACUAUC |
| siRNA 4608 | 4608 | AUAGUGCUUUUGUGAAAUU | 10098 | AAUUUCACAAAAGCACUAU |
| siRNA 4609 | 4609 | UAGUGCUUUUGUGAAAUUU | 10099 | AAAUUUCACAAAAGCACUA |
| siRNA 4610 | 4610 | AGUGCUUUUGUGAAAUUUU | 10100 | AAAAUUUCACAAAAGCACU |
| siRNA 4611 | 4611 | GUGCUUUUGUGAAAUUUUU | 10101 | AAAAAUUUCACAAAAGCAC |
| siRNA 4612 | 4612 | UGCUUUUGUGAAAUUUUUC | 10102 | GAAAAAUUUCACAAAAGCA |
| siRNA 4613 | 4613 | GCUUUUGUGAAAUUUUUCA | 10103 | UGAAAAAUUUCACAAAAGC |
| siRNA 4614 | 4614 | CUUUUGUGAAAUUUUUCAA | 10104 | UUGAAAAAUUUCACAAAAG |
| siRNA 4615 | 4615 | UUUUGUGAAAUUUUUCAAA | 10105 | UUUGAAAAAUUUCACAAAA |
| siRNA 4616 | 4616 | UUUGUGAAAUUUUUCAAAU | 10106 | AUUUGAAAAAUUUCACAAA |
| siRNA 4617 | 4617 | UUGUGAAAUUUUUCAAAUU | 10107 | AAUUUGAAAAAUUUCACAA |
| siRNA 4618 | 4618 | UGUGAAAUUUUUCAAAUUU | 10108 | AAAUUUGAAAAAUUUCACA |
| siRNA 4619 | 4619 | GUGAAAUUUUUCAAAUUUG | 10109 | CAAAUUUGAAAAAUUUCAC |
| siRNA 4620 | 4620 | UGAAAUUUUUCAAAUUUGA | 10110 | UCAAAUUUGAAAAAUUUCA |
| siRNA 4621 | 4621 | GAAAUUUUUCAAAUUUGAG | 10111 | CUCAAAUUUGAAAAAUUUC |
| siRNA 4622 | 4622 | AAAUUUUUCAAAUUUGAGU | 10112 | ACUCAAAUUUGAAAAAUUU |
| siRNA 4623 | 4623 | AAUUUUUCAAAUUUGAGUA | 10113 | UACUCAAAUUUGAAAAAUU |
| siRNA 4624 | 4624 | AUUUUUCAAAUUUGAGUAA | 10114 | UUACUCAAAUUUGAAAAAU |
| siRNA 4625 | 4625 | UUUUUCAAAUUUGAGUAAU | 10115 | AUUACUCAAAUUUGAAAAA |
| siRNA 4626 | 4626 | UUUUCAAAUUUGAGUAAUA | 10116 | UAUUACUCAAAUUUGAAAA |
| siRNA 4627 | 4627 | UUUCAAAUUUGAGUAAUAG | 10117 | CUAUUACUCAAAUUUGAAA |
| siRNA 4628 | 4628 | UUCAAAUUUGAGUAAUAGA | 10118 | UCUAUUACUCAAAUUUGAA |
| siRNA 4629 | 4629 | UCAAAUUUGAGUAAUAGAU | 10119 | AUCUAUUACUCAAAUUUGA |
| siRNA 4630 | 4630 | CAAAUUUGAGUAAUAGAUG | 10120 | CAUCUAUUACUCAAAUUUG |
| siRNA 4631 | 4631 | AAAUUUGAGUAAUAGAUGC | 10121 | GCAUCUAUUACUCAAAUUU |
| siRNA 4632 | 4632 | AAUUUGAGUAAUAGAUGCC | 10122 | GGCAUCUAUUACUCAAAUU |
| siRNA 4633 | 4633 | AUUUGAGUAAUAGAUGCCU | 10123 | AGGCAUCUAUUACUCAAAU |
| siRNA 4634 | 4634 | UUUGAGUAAUAGAUGCCUU | 10124 | AAGGCAUCUAUUACUCAAA |
| siRNA 4635 | 4635 | UUGAGUAAUAGAUGCCUUU | 10125 | AAAGGCAUCUAUUACUCAA |
| siRNA 4636 | 4636 | UGAGUAAUAGAUGCCUUUU | 10126 | AAAAGGCAUCUAUUACUCA |
| siRNA 4637 | 4637 | GAGUAAUAGAUGCCUUUUU | 10127 | AAAAAGGCAUCUAUUACUC |
| siRNA 4638 | 4638 | AGUAAUAGAUGCCUUUUUA | 10128 | UAAAAAGGCAUCUAUUACU |
| siRNA 4639 | 4639 | GUAAUAGAUGCCUUUUUAA | 10129 | UUAAAAAGGCAUCUAUUAC |
| siRNA 4640 | 4640 | UAAUAGAUGCCUUUUUAAG | 10130 | CUUAAAAAGGCAUCUAUUA |
| siRNA 4641 | 4641 | AAUAGAUGCCUUUUUAAGG | 10131 | CCUUAAAAAGGCAUCUAUU |
| siRNA 4642 | 4642 | AUAGAUGCCUUUUUAAGGC | 10132 | GCCUUAAAAAGGCAUCUAU |
| siRNA 4643 | 4643 | UAGAUGCCUUUUUAAGGCA | 10133 | UGCCUUAAAAAGGCAUCUA |
| siRNA 4644 | 4644 | AGAUGCCUUUUUAAGGCAG | 10134 | CUGCCUUAAAAAGGCAUCU |
| siRNA 4645 | 4645 | GAUGCCUUUUUAAGGCAGU | 10135 | ACUGCCUUAAAAAGGCAUC |
| siRNA 4646 | 4646 | AUGCCUUUUUAAGGCAGUG | 10136 | CACUGCCUUAAAAAGGCAU |
| siRNA 4647 | 4647 | UGCCUUUUUAAGGCAGUGA | 10137 | UCACUGCCUUAAAAAGGCA |
| siRNA 4648 | 4648 | GCCUUUUUAAGGCAGUGAA | 10138 | UUCACUGCCUUAAAAAGGC |
| siRNA 4649 | 4649 | CCUUUUUAAGGCAGUGAAU | 10139 | AUUCACUGCCUUAAAAAGG |
| siRNA 4650 | 4650 | CUUUUUAAGGCAGUGAAUU | 10140 | AAUUCACUGCCUUAAAAAG |
| siRNA 4651 | 4651 | UUUUUAAGGCAGUGAAUUU | 10141 | AAAUUCACUGCCUUAAAAA |
| siRNA 4652 | 4652 | UUUUAAGGCAGUGAAUUUA | 10142 | UAAAUUCACUGCCUUAAAA |
| siRNA 4653 | 4653 | UUUAAGGCAGUGAAUUUAC | 10143 | GUAAAUUCACUGCCUUAAA |
| siRNA 4654 | 4654 | UUAAGGCAGUGAAUUUACA | 10144 | UGUAAAUUCACUGCCUUAA |
| siRNA 4655 | 4655 | UAAGGCAGUGAAUUUACAC | 10145 | GUGUAAAUUCACUGCCUUA |
| siRNA 4656 | 4656 | AAGGCAGUGAAUUUACACA | 10146 | UGUGUAAAUUCACUGCCUU |
| siRNA 4657 | 4657 | AGGCAGUGAAUUUACACAA | 10147 | UUGUGUAAAUUCACUGCCU |
| siRNA 4658 | 4658 | GGCAGUGAAUUUACACAAA | 10148 | UUUGUGUAAAUUCACUGCC |
| siRNA 4659 | 4659 | GCAGUGAAUUUACACAAAU | 10149 | AUUUGUGUAAAUUCACUGC |
| siRNA 4660 | 4660 | CAGUGAAUUUACACAAAUA | 10150 | UAUUUGUGUAAAUUCACUG |
| siRNA 4661 | 4661 | AGUGAAUUUACACAAAUAU | 10151 | AUAUUUGUGUAAAUUCACU |
| siRNA 4662 | 4662 | GUGAAUUUACACAAAUAUG | 10152 | CAUAUUUGUGUAAAUUCAC |
| siRNA 4663 | 4663 | UGAAUUUACACAAAUAUGG | 10153 | CCAUAUUUGUGUAAAUUCA |
| siRNA 4664 | 4664 | GAAUUUACACAAAUAUGGG | 10154 | CCCAUAUUUGUGUAAAUUC |
| siRNA 4665 | 4665 | AAUUUACACAAAUAUGGGA | 10155 | UCCCAUAUUUGUGUAAAUU |
| siRNA 4666 | 4666 | AUUUACACAAAUAUGGGAG | 10156 | CUCCCAUAUUUGUGUAAAU |
| siRNA 4667 | 4667 | UUUACACAAAUAUGGGAGG | 10157 | CCUCCCAUAUUUGUGUAAA |
| siRNA 4668 | 4668 | UUACACAAAUAUGGGAGGG | 10158 | CCCUCCCAUAUUUGUGUAA |
| siRNA 4669 | 4669 | UACACAAAUAUGGGAGGGG | 10159 | CCCCUCCCAUAUUUGUGUA |
| siRNA 4670 | 4670 | ACACAAAUAUGGGAGGGGU | 10160 | ACCCCUCCCAUAUUUGUGU |
| siRNA 4671 | 4671 | CACAAAUAUGGGAGGGGUA | 10161 | UACCCCUCCCAUAUUUGUG |
| siRNA 4672 | 4672 | ACAAAUAUGGGAGGGGUAU | 10162 | AUACCCCUCCCAUAUUUGU |
| siRNA 4673 | 4673 | CAAAUAUGGGAGGGGUAUA | 10163 | UAUACCCCUCCCAUAUUUG |
| siRNA 4674 | 4674 | AAAUAUGGGAGGGGUAUAU | 10164 | AUAUACCCCUCCCAUAUUU |
| siRNA 4675 | 4675 | AAUAUGGGAGGGGUAUAUG | 10165 | CAUAUACCCCUCCCAUAUU |
| siRNA 4676 | 4676 | AUAUGGGAGGGGUAUAUGG | 10166 | CCAUAUACCCCUCCCAUAU |
| siRNA 4677 | 4677 | UAUGGGAGGGGUAUAUGGU | 10167 | ACCAUAUACCCCUCCCAUA |
| siRNA 4678 | 4678 | AUGGGAGGGGUAUAUGGUG | 10168 | CACCAUAUACCCCUCCCAU |
| siRNA 4679 | 4679 | UGGGAGGGGUAUAUGGUGU | 10169 | ACACCAUAUACCCCUCCCA |
| siRNA 4680 | 4680 | GGGAGGGGUAUAUGGUGUU | 10170 | AACACCAUAUACCCCUCCC |
| siRNA 4681 | 4681 | GGAGGGGUAUAUGGUGUUA | 10171 | UAACACCAUAUACCCCUCC |
| siRNA 4682 | 4682 | GAGGGGUAUAUGGUGUUAC | 10172 | GUAACACCAUAUACCCCUC |
| siRNA 4683 | 4683 | AGGGGUAUAUGGUGUUACU | 10173 | AGUAACACCAUAUACCCCU |
| siRNA 4684 | 4684 | GGGGUAUAUGGUGUUACUG | 10174 | CAGUAACACCAUAUACCCC |
| siRNA 4685 | 4685 | GGGUAUAUGGUGUUACUGA | 10175 | UCAGUAACACCAUAUACCC |
| siRNA 4686 | 4686 | GGUAUAUGGUGUUACUGAU | 10176 | AUCAGUAACACCAUAUACC |
| siRNA 4687 | 4687 | GUAUAUGGUGUUACUGAUU | 10177 | AAUCAGUAACACCAUAUAC |
| siRNA 4688 | 4688 | UAUAUGGUGUUACUGAUUU | 10178 | AAAUCAGUAACACCAUAUA |
| siRNA 4689 | 4689 | AUAUGGUGUUACUGAUUUU | 10179 | AAAAUCAGUAACACCAUAU |
| siRNA 4690 | 4690 | UAUGGUGUUACUGAUUUUU | 10180 | AAAAAUCAGUAACACCAUA |
| siRNA 4691 | 4691 | AUGGUGUUACUGAUUUUUA | 10181 | UAAAAAUCAGUAACACCAU |
| siRNA 4692 | 4692 | UGGUGUUACUGAUUUUUAA | 10182 | UUAAAAAUCAGUAACACCA |
| siRNA 4693 | 4693 | GGUGUUACUGAUUUUUAAA | 10183 | UUUAAAAAUCAGUAACACC |
| siRNA 4694 | 4694 | GUGUUACUGAUUUUUAAAC | 10184 | GUUUAAAAAUCAGUAACAC |
| siRNA 4695 | 4695 | UGUUACUGAUUUUUAAACC | 10185 | GGUUUAAAAAUCAGUAACA |
| siRNA 4696 | 4696 | GUUACUGAUUUUUAAACCU | 10186 | AGGUUUAAAAAUCAGUAAC |
| siRNA 4697 | 4697 | UUACUGAUUUUUAAACCUC | 10187 | GAGGUUUAAAAAUCAGUAA |
| siRNA 4698 | 4698 | UACUGAUUUUUAAACCUCU | 10188 | AGAGGUUUAAAAAUCAGUA |
| siRNA 4699 | 4699 | ACUGAUUUUUAAACCUCUU | 10189 | AAGAGGUUUAAAAAUCAGU |
| siRNA 4700 | 4700 | CUGAUUUUUAAACCUCUUU | 10190 | AAAGAGGUUUAAAAAUCAG |
| siRNA 4701 | 4701 | UGAUUUUUAAACCUCUUUG | 10191 | CAAAGAGGUUUAAAAAUCA |
| siRNA 4702 | 4702 | GAUUUUUAAACCUCUUUGA | 10192 | UCAAAGAGGUUUAAAAAUC |
| siRNA 4703 | 4703 | AUUUUUAAACCUCUUUGAC | 10193 | GUCAAAGAGGUUUAAAAAU |
| siRNA 4704 | 4704 | UUUUUAAACCUCUUUGACC | 10194 | GGUCAAAGAGGUUUAAAAA |
| siRNA 4705 | 4705 | UUUUAAACCUCUUUGACCA | 10195 | UGGUCAAAGAGGUUUAAAA |
| siRNA 4706 | 4706 | UUUAAACCUCUUUGACCAU | 10196 | AUGGUCAAAGAGGUUUAAA |
| siRNA 4707 | 4707 | UUAAACCUCUUUGACCAUC | 10197 | GAUGGUCAAAGAGGUUUAA |
| siRNA 4708 | 4708 | UAAACCUCUUUGACCAUCU | 10198 | AGAUGGUCAAAGAGGUUUA |
| siRNA 4709 | 4709 | AAACCUCUUUGACCAUCUU | 10199 | AAGAUGGUCAAAGAGGUUU |
| siRNA 4710 | 4710 | AACCUCUUUGACCAUCUUC | 10200 | GAAGAUGGUCAAAGAGGUU |
| siRNA 4711 | 4711 | ACCUCUUUGACCAUCUUCU | 10201 | AGAAGAUGGUCAAAGAGGU |
| siRNA 4712 | 4712 | CCUCUUUGACCAUCUUCUA | 10202 | UAGAAGAUGGUCAAAGAGG |
| siRNA 4713 | 4713 | CUCUUUGACCAUCUUCUAG | 10203 | CUAGAAGAUGGUCAAAGAG |
| siRNA 4714 | 4714 | UCUUUGACCAUCUUCUAGU | 10204 | ACUAGAAGAUGGUCAAAGA |
| siRNA 4715 | 4715 | CUUUGACCAUCUUCUAGUU | 10205 | AACUAGAAGAUGGUCAAAG |
| siRNA 4716 | 4716 | UUUGACCAUCUUCUAGUUU | 10206 | AAACUAGAAGAUGGUCAAA |
| siRNA 4717 | 4717 | UUGACCAUCUUCUAGUUUU | 10207 | AAAACUAGAAGAUGGUCAA |
| siRNA 4718 | 4718 | UGACCAUCUUCUAGUUUUU | 10208 | AAAAACUAGAAGAUGGUCA |
| siRNA 4719 | 4719 | GACCAUCUUCUAGUUUUUA | 10209 | UAAAAACUAGAAGAUGGUC |
| siRNA 4720 | 4720 | ACCAUCUUCUAGUUUUUAC | 10210 | GUAAAAACUAGAAGAUGGU |
| siRNA 4721 | 4721 | CCAUCUUCUAGUUUUUACU | 10211 | AGUAAAAACUAGAAGAUGG |
| siRNA 4722 | 4722 | CAUCUUCUAGUUUUUACUU | 10212 | AAGUAAAAACUAGAAGAUG |
| siRNA 4723 | 4723 | AUCUUCUAGUUUUUACUUC | 10213 | GAAGUAAAAACUAGAAGAU |
| siRNA 4724 | 4724 | UCUUCUAGUUUUUACUUCU | 10214 | AGAAGUAAAAACUAGAAGA |
| siRNA 4725 | 4725 | CUUCUAGUUUUUACUUCUA | 10215 | UAGAAGUAAAAACUAGAAG |
| siRNA 4726 | 4726 | UUCUAGUUUUUACUUCUAG | 10216 | CUAGAAGUAAAAACUAGAA |
| siRNA 4727 | 4727 | UCUAGUUUUUACUUCUAGU | 10217 | ACUAGAAGUAAAAACUAGA |
| siRNA 4728 | 4728 | CUAGUUUUUACUUCUAGUU | 10218 | AACUAGAAGUAAAAACUAG |
| siRNA 4729 | 4729 | UAGUUUUUACUUCUAGUUU | 10219 | AAACUAGAAGUAAAAACUA |
| siRNA 4730 | 4730 | AGUUUUUACUUCUAGUUUU | 10220 | AAAACUAGAAGUAAAAACU |
| siRNA 4731 | 4731 | GUUUUUACUUCUAGUUUUU | 10221 | AAAAACUAGAAGUAAAAAC |
| siRNA 4732 | 4732 | UUUUUACUUCUAGUUUUUA | 10222 | UAAAAACUAGAAGUAAAAA |
| siRNA 4733 | 4733 | UUUUACUUCUAGUUUUUAC | 10223 | GUAAAAACUAGAAGUAAAA |
| siRNA 4734 | 4734 | UUUACUUCUAGUUUUUACA | 10224 | UGUAAAAACUAGAAGUAAA |
| siRNA 4735 | 4735 | UUACUUCUAGUUUUUACAU | 10225 | AUGUAAAAACUAGAAGUAA |
| siRNA 4736 | 4736 | UACUUCUAGUUUUUACAUC | 10226 | GAUGUAAAAACUAGAAGUA |
| siRNA 4737 | 4737 | ACUUCUAGUUUUUACAUCU | 10227 | AGAUGUAAAAACUAGAAGU |
| siRNA 4738 | 4738 | CUUCUAGUUUUUACAUCUA | 10228 | UAGAUGUAAAAACUAGAAG |
| siRNA 4739 | 4739 | UUCUAGUUUUUACAUCUAG | 10229 | CUAGAUGUAAAAACUAGAA |
| siRNA 4740 | 4740 | UCUAGUUUUUACAUCUAGG | 10230 | CCUAGAUGUAAAAACUAGA |
| siRNA 4741 | 4741 | CUAGUUUUUACAUCUAGGA | 10231 | UCCUAGAUGUAAAAACUAG |
| siRNA 4742 | 4742 | UAGUUUUUACAUCUAGGAG | 10232 | CUCCUAGAUGUAAAAACUA |
| siRNA 4743 | 4743 | AGUUUUUACAUCUAGGAGA | 10233 | UCUCCUAGAUGUAAAAACU |
| siRNA 4744 | 4744 | GUUUUUACAUCUAGGAGAA | 10234 | UUCUCCUAGAUGUAAAAAC |
| siRNA 4745 | 4745 | UUUUUACAUCUAGGAGAAU | 10235 | AUUCUCCUAGAUGUAAAAA |
| siRNA 4746 | 4746 | UUUUACAUCUAGGAGAAUU | 10236 | AAUUCUCCUAGAUGUAAAA |
| siRNA 4747 | 4747 | UUUACAUCUAGGAGAAUUG | 10237 | CAAUUCUCCUAGAUGUAAA |
| siRNA 4748 | 4748 | UUACAUCUAGGAGAAUUGU | 10238 | ACAAUUCUCCUAGAUGUAA |
| siRNA 4749 | 4749 | UACAUCUAGGAGAAUUGUG | 10239 | CACAAUUCUCCUAGAUGUA |
| siRNA 4750 | 4750 | ACAUCUAGGAGAAUUGUGA | 10240 | UCACAAUUCUCCUAGAUGU |
| siRNA 4751 | 4751 | CAUCUAGGAGAAUUGUGAA | 10241 | UUCACAAUUCUCCUAGAUG |
| siRNA 4752 | 4752 | AUCUAGGAGAAUUGUGAAU | 10242 | AUUCACAAUUCUCCUAGAU |
| siRNA 4753 | 4753 | UCUAGGAGAAUUGUGAAUA | 10243 | UAUUCACAAUUCUCCUAGA |
| siRNA 4754 | 4754 | CUAGGAGAAUUGUGAAUAA | 10244 | UUAUUCACAAUUCUCCUAG |
| siRNA 4755 | 4755 | UAGGAGAAUUGUGAAUAAC | 10245 | GUUAUUCACAAUUCUCCUA |
| siRNA 4756 | 4756 | AGGAGAAUUGUGAAUAACA | 10246 | UGUUAUUCACAAUUCUCCU |
| siRNA 4757 | 4757 | GGAGAAUUGUGAAUAACAC | 10247 | GUGUUAUUCACAAUUCUCC |
| siRNA 4758 | 4758 | GAGAAUUGUGAAUAACACC | 10248 | GGUGUUAUUCACAAUUCUC |
| siRNA 4759 | 4759 | AGAAUUGUGAAUAACACCA | 10249 | UGGUGUUAUUCACAAUUCU |
| siRNA 4760 | 4760 | GAAUUGUGAAUAACACCAA | 10250 | UUGGUGUUAUUCACAAUUC |
| siRNA 4761 | 4761 | AAUUGUGAAUAACACCAAC | 10251 | GUUGGUGUUAUUCACAAUU |
| siRNA 4762 | 4762 | AUUGUGAAUAACACCAACU | 10252 | AGUUGGUGUUAUUCACAAU |
| siRNA 4763 | 4763 | UUGUGAAUAACACCAACUG | 10253 | CAGUUGGUGUUAUUCACAA |
| siRNA 4764 | 4764 | UGUGAAUAACACCAACUGU | 10254 | ACAGUUGGUGUUAUUCACA |
| siRNA 4765 | 4765 | GUGAAUAACACCAACUGUU | 10255 | AACAGUUGGUGUUAUUCAC |
| siRNA 4766 | 4766 | UGAAUAACACCAACUGUUC | 10256 | GAACAGUUGGUGUUAUUCA |
| siRNA 4767 | 4767 | GAAUAACACCAACUGUUCU | 10257 | AGAACAGUUGGUGUUAUUC |
| siRNA 4768 | 4768 | AAUAACACCAACUGUUCUU | 10258 | AAGAACAGUUGGUGUUAUU |
| siRNA 4769 | 4769 | AUAACACCAACUGUUCUUA | 10259 | UAAGAACAGUUGGUGUUAU |
| siRNA 4770 | 4770 | UAACACCAACUGUUCUUAA | 10260 | UUAAGAACAGUUGGUGUUA |
| siRNA 4771 | 4771 | AACACCAACUGUUCUUAAA | 10261 | UUUAAGAACAGUUGGUGUU |
| siRNA 4772 | 4772 | ACACCAACUGUUCUUAAAC | 10262 | GUUUAAGAACAGUUGGUGU |
| siRNA 4773 | 4773 | CACCAACUGUUCUUAAACU | 10263 | AGUUUAAGAACAGUUGGUG |
| siRNA 4774 | 4774 | ACCAACUGUUCUUAAACUC | 10264 | GAGUUUAAGAACAGUUGGU |
| siRNA 4775 | 4775 | CCAACUGUUCUUAAACUCU | 10265 | AGAGUUUAAGAACAGUUGG |
| siRNA 4776 | 4776 | CAACUGUUCUUAAACUCUU | 10266 | AAGAGUUUAAGAACAGUUG |
| siRNA 4777 | 4777 | AACUGUUCUUAAACUCUUU | 10267 | AAAGAGUUUAAGAACAGUU |
| siRNA 4778 | 4778 | ACUGUUCUUAAACUCUUUA | 10268 | UAAAGAGUUUAAGAACAGU |
| siRNA 4779 | 4779 | CUGUUCUUAAACUCUUUAA | 10269 | UUAAAGAGUUUAAGAACAG |
| siRNA 4780 | 4780 | UGUUCUUAAACUCUUUAAU | 10270 | AUUAAAGAGUUUAAGAACA |
| siRNA 4781 | 4781 | GUUCUUAAACUCUUUAAUG | 10271 | CAUUAAAGAGUUUAAGAAC |
| siRNA 4782 | 4782 | UUCUUAAACUCUUUAAUGC | 10272 | GCAUUAAAGAGUUUAAGAA |
| siRNA 4783 | 4783 | UCUUAAACUCUUUAAUGCC | 10273 | GGCAUUAAAGAGUUUAAGA |
| siRNA 4784 | 4784 | CUUAAACUCUUUAAUGCCA | 10274 | UGGCAUUAAAGAGUUUAAG |
| siRNA 4785 | 4785 | UUAAACUCUUUAAUGCCAU | 10275 | AUGGCAUUAAAGAGUUUAA |
| siRNA 4786 | 4786 | UAAACUCUUUAAUGCCAUG | 10276 | CAUGGCAUUAAAGAGUUUA |
| siRNA 4787 | 4787 | AAACUCUUUAAUGCCAUGU | 10277 | ACAUGGCAUUAAAGAGUUU |
| siRNA 4788 | 4788 | AACUCUUUAAUGCCAUGUC | 10278 | GACAUGGCAUUAAAGAGUU |
| siRNA 4789 | 4789 | ACUCUUUAAUGCCAUGUCU | 10279 | AGACAUGGCAUUAAAGAGU |
| siRNA 4790 | 4790 | CUCUUUAAUGCCAUGUCUU | 10280 | AAGACAUGGCAUUAAAGAG |
| siRNA 4791 | 4791 | UCUUUAAUGCCAUGUCUUA | 10281 | UAAGACAUGGCAUUAAAGA |
| siRNA 4792 | 4792 | CUUUAAUGCCAUGUCUUAA | 10282 | UUAAGACAUGGCAUUAAAG |
| siRNA 4793 | 4793 | UUUAAUGCCAUGUCUUAAA | 10283 | UUUAAGACAUGGCAUUAAA |
| siRNA 4794 | 4794 | UUAAUGCCAUGUCUUAAAU | 10284 | AUUUAAGACAUGGCAUUAA |
| siRNA 4795 | 4795 | UAAUGCCAUGUCUUAAAUG | 10285 | CAUUUAAGACAUGGCAUUA |
| siRNA 4796 | 4796 | AAUGCCAUGUCUUAAAUGC | 10286 | GCAUUUAAGACAUGGCAUU |
| siRNA 4797 | 4797 | AUGCCAUGUCUUAAAUGCC | 10287 | GGCAUUUAAGACAUGGCAU |
| siRNA 4798 | 4798 | UGCCAUGUCUUAAAUGCCG | 10288 | CGGCAUUUAAGACAUGGCA |
| siRNA 4799 | 4799 | GCCAUGUCUUAAAUGCCGG | 10289 | CCGGCAUUUAAGACAUGGC |
| siRNA 4800 | 4800 | CCAUGUCUUAAAUGCCGGU | 10290 | ACCGGCAUUUAAGACAUGG |
| siRNA 4801 | 4801 | CAUGUCUUAAAUGCCGGUA | 10291 | UACCGGCAUUUAAGACAUG |
| siRNA 4802 | 4802 | AUGUCUUAAAUGCCGGUAU | 10292 | AUACCGGCAUUUAAGACAU |
| siRNA 4803 | 4803 | UGUCUUAAAUGCCGGUAUU | 10293 | AAUACCGGCAUUUAAGACA |
| siRNA 4804 | 4804 | GUCUUAAAUGCCGGUAUUU | 10294 | AAAUACCGGCAUUUAAGAC |
| siRNA 4805 | 4805 | UCUUAAAUGCCGGUAUUUG | 10295 | CAAAUACCGGCAUUUAAGA |
| siRNA 4806 | 4806 | CUUAAAUGCCGGUAUUUGC | 10296 | GCAAAUACCGGCAUUUAAG |
| siRNA 4807 | 4807 | UUAAAUGCCGGUAUUUGCU | 10297 | AGCAAAUACCGGCAUUUAA |
| siRNA 4808 | 4808 | UAAAUGCCGGUAUUUGCUG | 10298 | CAGCAAAUACCGGCAUUUA |
| siRNA 4809 | 4809 | AAAUGCCGGUAUUUGCUGC | 10299 | GCAGCAAAUACCGGCAUUU |
| siRNA 4810 | 4810 | AAUGCCGGUAUUUGCUGCU | 10300 | AGCAGCAAAUACCGGCAUU |
| siRNA 4811 | 4811 | AUGCCGGUAUUUGCUGCUG | 10301 | CAGCAGCAAAUACCGGCAU |
| siRNA 4812 | 4812 | UGCCGGUAUUUGCUGCUGA | 10302 | UCAGCAGCAAAUACCGGCA |
| siRNA 4813 | 4813 | GCCGGUAUUUGCUGCUGAA | 10303 | UUCAGCAGCAAAUACCGGC |
| siRNA 4814 | 4814 | CCGGUAUUUGCUGCUGAAG | 10304 | CUUCAGCAGCAAAUACCGG |
| siRNA 4815 | 4815 | CGGUAUUUGCUGCUGAAGA | 10305 | UCUUCAGCAGCAAAUACCG |
| siRNA 4816 | 4816 | GGUAUUUGCUGCUGAAGAC | 10306 | GUCUUCAGCAGCAAAUACC |
| siRNA 4817 | 4817 | GUAUUUGCUGCUGAAGACA | 10307 | UGUCUUCAGCAGCAAAUAC |
| siRNA 4818 | 4818 | UAUUUGCUGCUGAAGACAA | 10308 | UUGUCUUCAGCAGCAAAUA |
| siRNA 4819 | 4819 | AUUUGCUGCUGAAGACAAA | 10309 | UUUGUCUUCAGCAGCAAAU |
| siRNA 4820 | 4820 | UUUGCUGCUGAAGACAAAA | 10310 | UUUUGUCUUCAGCAGCAAA |
| siRNA 4821 | 4821 | UUGCUGCUGAAGACAAAAA | 10311 | UUUUUGUCUUCAGCAGCAA |
| siRNA 4822 | 4822 | UGCUGCUGAAGACAAAAAU | 10312 | AUUUUUGUCUUCAGCAGCA |
| siRNA 4823 | 4823 | GCUGCUGAAGACAAAAAUG | 10313 | CAUUUUUGUCUUCAGCAGC |
| siRNA 4824 | 4824 | CUGCUGAAGACAAAAAUGA | 10314 | UCAUUUUUGUCUUCAGCAG |
| siRNA 4825 | 4825 | UGCUGAAGACAAAAAUGAA | 10315 | UUCAUUUUUGUCUUCAGCA |
| siRNA 4826 | 4826 | GCUGAAGACAAAAAUGAAA | 10316 | UUUCAUUUUUGUCUUCAGC |
| siRNA 4827 | 4827 | CUGAAGACAAAAAUGAAAA | 10317 | UUUUCAUUUUUGUCUUCAG |
| siRNA 4828 | 4828 | UGAAGACAAAAAUGAAAAG | 10318 | CUUUUCAUUUUUGUCUUCA |
| siRNA 4829 | 4829 | GAAGACAAAAAUGAAAAGU | 10319 | ACUUUUCAUUUUUGUCUUC |
| siRNA 4830 | 4830 | AAGACAAAAAUGAAAAGUA | 10320 | UACUUUUCAUUUUUGUCUU |
| siRNA 4831 | 4831 | AGACAAAAAUGAAAAGUAG | 10321 | CUACUUUUCAUUUUUGUCU |
| siRNA 4832 | 4832 | GACAAAAAUGAAAAGUAGG | 10322 | CCUACUUUUCAUUUUUGUC |
| siRNA 4833 | 4833 | ACAAAAAUGAAAAGUAGGA | 10323 | UCCUACUUUUCAUUUUUGU |
| siRNA 4834 | 4834 | CAAAAAUGAAAAGUAGGAU | 10324 | AUCCUACUUUUCAUUUUUG |
| siRNA 4835 | 4835 | AAAAAUGAAAAGUAGGAUG | 10325 | CAUCCUACUUUUCAUUUUU |
| siRNA 4836 | 4836 | AAAAUGAAAAGUAGGAUGA | 10326 | UCAUCCUACUUUUCAUUUU |
| siRNA 4837 | 4837 | AAAUGAAAAGUAGGAUGAA | 10327 | UUCAUCCUACUUUUCAUUU |
| siRNA 4838 | 4838 | AAUGAAAAGUAGGAUGAAA | 10328 | UUUCAUCCUACUUUUCAUU |
| siRNA 4839 | 4839 | AUGAAAAGUAGGAUGAAAA | 10329 | UUUUCAUCCUACUUUUCAU |
| siRNA 4840 | 4840 | UGAAAAGUAGGAUGAAAAU | 10330 | AUUUUCAUCCUACUUUUCA |
| siRNA 4841 | 4841 | GAAAAGUAGGAUGAAAAUA | 10331 | UAUUUUCAUCCUACUUUUC |
| siRNA 4842 | 4842 | AAAAGUAGGAUGAAAAUAA | 10332 | UUAUUUUCAUCCUACUUUU |
| siRNA 4843 | 4843 | AAAGUAGGAUGAAAAUAAU | 10333 | AUUAUUUUCAUCCUACUUU |
| siRNA 4844 | 4844 | AAGUAGGAUGAAAAUAAUA | 10334 | UAUUAUUUUCAUCCUACUU |
| siRNA 4845 | 4845 | AGUAGGAUGAAAAUAAUAG | 10335 | CUAUUAUUUUCAUCCUACU |
| siRNA 4846 | 4846 | GUAGGAUGAAAAUAAUAGA | 10336 | UCUAUUAUUUUCAUCCUAC |
| siRNA 4847 | 4847 | UAGGAUGAAAAUAAUAGAA | 10337 | UUCUAUUAUUUUCAUCCUA |
| siRNA 4848 | 4848 | AGGAUGAAAAUAAUAGAAU | 10338 | AUUCUAUUAUUUUCAUCCU |
| siRNA 4849 | 4849 | GGAUGAAAAUAAUAGAAUG | 10339 | CAUUCUAUUAUUUUCAUCC |
| siRNA 4850 | 4850 | GAUGAAAAUAAUAGAAUGG | 10340 | CCAUUCUAUUAUUUUCAUC |
| siRNA 4851 | 4851 | AUGAAAAUAAUAGAAUGGC | 10341 | GCCAUUCUAUUAUUUUCAU |
| siRNA 4852 | 4852 | UGAAAAUAAUAGAAUGGCA | 10342 | UGCCAUUCUAUUAUUUUCA |
| siRNA 4853 | 4853 | GAAAAUAAUAGAAUGGCAC | 10343 | GUGCCAUUCUAUUAUUUUC |
| siRNA 4854 | 4854 | AAAAUAAUAGAAUGGCACU | 10344 | AGUGCCAUUCUAUUAUUUU |
| siRNA 4855 | 4855 | AAAUAAUAGAAUGGCACUG | 10345 | CAGUGCCAUUCUAUUAUUU |
| siRNA 4856 | 4856 | AAUAAUAGAAUGGCACUGU | 10346 | ACAGUGCCAUUCUAUUAUU |
| siRNA 4857 | 4857 | AUAAUAGAAUGGCACUGUA | 10347 | UACAGUGCCAUUCUAUUAU |
| siRNA 4858 | 4858 | UAAUAGAAUGGCACUGUAA | 10348 | UUACAGUGCCAUUCUAUUA |
| siRNA 4859 | 4859 | AAUAGAAUGGCACUGUAAG | 10349 | CUUACAGUGCCAUUCUAUU |
| siRNA 4860 | 4860 | AUAGAAUGGCACUGUAAGU | 10350 | ACUUACAGUGCCAUUCUAU |
| siRNA 4861 | 4861 | UAGAAUGGCACUGUAAGUG | 10351 | CACUUACAGUGCCAUUCUA |
| siRNA 4862 | 4862 | AGAAUGGCACUGUAAGUGU | 10352 | ACACUUACAGUGCCAUUCU |
| siRNA 4863 | 4863 | GAAUGGCACUGUAAGUGUU | 10353 | AACACUUACAGUGCCAUUC |
| siRNA 4864 | 4864 | AAUGGCACUGUAAGUGUUU | 10354 | AAACACUUACAGUGCCAUU |
| siRNA 4865 | 4865 | AUGGCACUGUAAGUGUUUA | 10355 | UAAACACUUACAGUGCCAU |
| siRNA 4866 | 4866 | UGGCACUGUAAGUGUUUAU | 10356 | AUAAACACUUACAGUGCCA |
| siRNA 4867 | 4867 | GGCACUGUAAGUGUUUAUU | 10357 | AAUAAACACUUACAGUGCC |
| siRNA 4868 | 4868 | GCACUGUAAGUGUUUAUUA | 10358 | UAAUAAACACUUACAGUGC |
| siRNA 4869 | 4869 | CACUGUAAGUGUUUAUUAU | 10359 | AUAAUAAACACUUACAGUG |
| siRNA 4870 | 4870 | ACUGUAAGUGUUUAUUAUU | 10360 | AAUAAUAAACACUUACAGU |
| siRNA 4871 | 4871 | CUGUAAGUGUUUAUUAUUU | 10361 | AAAUAAUAAACACUUACAG |
| siRNA 4872 | 4872 | UGUAAGUGUUUAUUAUUUU | 10362 | AAAAUAAUAAACACUUACA |
| siRNA 4873 | 4873 | GUAAGUGUUUAUUAUUUUG | 10363 | CAAAAUAAUAAACACUUAC |
| siRNA 4874 | 4874 | UAAGUGUUUAUUAUUUUGU | 10364 | ACAAAAUAAUAAACACUUA |
| siRNA 4875 | 4875 | AAGUGUUUAUUAUUUUGUC | 10365 | GACAAAAUAAUAAACACUU |
| siRNA 4876 | 4876 | AGUGUUUAUUAUUUUGUCA | 10366 | UGACAAAAUAAUAAACACU |
| siRNA 4877 | 4877 | GUGUUUAUUAUUUUGUCAA | 10367 | UUGACAAAAUAAUAAACAC |
| siRNA 4878 | 4878 | UGUUUAUUAUUUUGUCAAA | 10368 | UUUGACAAAAUAAUAAACA |
| siRNA 4879 | 4879 | GUUUAUUAUUUUGUCAAAA | 10369 | UUUUGACAAAAUAAUAAAC |
| siRNA 4880 | 4880 | UUUAUUAUUUUGUCAAAAU | 10370 | AUUUUGACAAAAUAAUAAA |
| siRNA 4881 | 4881 | UUAUUAUUUUGUCAAAAUG | 10371 | CAUUUUGACAAAAUAAUAA |
| siRNA 4882 | 4882 | UAUUAUUUUGUCAAAAUGU | 10372 | ACAUUUUGACAAAAUAAUA |
| siRNA 4883 | 4883 | AUUAUUUUGUCAAAAUGUA | 10373 | UACAUUUUGACAAAAUAAU |
| siRNA 4884 | 4884 | UUAUUUUGUCAAAAUGUAA | 10374 | UUACAUUUUGACAAAAUAA |
| siRNA 4885 | 4885 | UAUUUUGUCAAAAUGUAAA | 10375 | UUUACAUUUUGACAAAAUA |
| siRNA 4886 | 4886 | AUUUUGUCAAAAUGUAAAC | 10376 | GUUUACAUUUUGACAAAAU |
| siRNA 4887 | 4887 | UUUUGUCAAAAUGUAAACA | 10377 | UGUUUACAUUUUGACAAAA |
| siRNA 4888 | 4888 | UUUGUCAAAAUGUAAACAA | 10378 | UUGUUUACAUUUUGACAAA |
| siRNA 4889 | 4889 | UUGUCAAAAUGUAAACAAA | 10379 | UUUGUUUACAUUUUGACAA |
| siRNA 4890 | 4890 | UGUCAAAAUGUAAACAAAG | 10380 | CUUUGUUUACAUUUUGACA |
| siRNA 4891 | 4891 | GUCAAAAUGUAAACAAAGA | 10381 | UCUUUGUUUACAUUUUGAC |
| siRNA 4892 | 4892 | UCAAAAUGUAAACAAAGAC | 10382 | GUCUUUGUUUACAUUUUGA |
| siRNA 4893 | 4893 | CAAAAUGUAAACAAAGACU | 10383 | AGUCUUUGUUUACAUUUUG |
| siRNA 4894 | 4894 | AAAAUGUAAACAAAGACUA | 10384 | UAGUCUUUGUUUACAUUUU |
| siRNA 4895 | 4895 | AAAUGUAAACAAAGACUAC | 10385 | GUAGUCUUUGUUUACAUUU |
| siRNA 4896 | 4896 | AAUGUAAACAAAGACUACA | 10386 | UGUAGUCUUUGUUUACAUU |
| siRNA 4897 | 4897 | AUGUAAACAAAGACUACAU | 10387 | AUGUAGUCUUUGUUUACAU |
| siRNA 4898 | 4898 | UGUAAACAAAGACUACAUA | 10388 | UAUGUAGUCUUUGUUUACA |
| siRNA 4899 | 4899 | GUAAACAAAGACUACAUAA | 10389 | UUAUGUAGUCUUUGUUUAC |
| siRNA 4900 | 4900 | UAAACAAAGACUACAUAAC | 10390 | GUUAUGUAGUCUUUGUUUA |
| siRNA 4901 | 4901 | AAACAAAGACUACAUAACC | 10391 | GGUUAUGUAGUCUUUGUUU |
| siRNA 4902 | 4902 | AACAAAGACUACAUAACCC | 10392 | GGGUUAUGUAGUCUUUGUU |
| siRNA 4903 | 4903 | ACAAAGACUACAUAACCCA | 10393 | UGGGUUAUGUAGUCUUUGU |
| siRNA 4904 | 4904 | CAAAGACUACAUAACCCAA | 10394 | UUGGGUUAUGUAGUCUUUG |
| siRNA 4905 | 4905 | AAAGACUACAUAACCCAAU | 10395 | AUUGGGUUAUGUAGUCUUU |
| siRNA 4906 | 4906 | AAGACUACAUAACCCAAUG | 10396 | CAUUGGGUUAUGUAGUCUU |
| siRNA 4907 | 4907 | AGACUACAUAACCCAAUGA | 10397 | UCAUUGGGUUAUGUAGUCU |
| siRNA 4908 | 4908 | GACUACAUAACCCAAUGAU | 10398 | AUCAUUGGGUUAUGUAGUC |
| siRNA 4909 | 4909 | ACUACAUAACCCAAUGAUG | 10399 | CAUCAUUGGGUUAUGUAGU |
| siRNA 4910 | 4910 | CUACAUAACCCAAUGAUGG | 10400 | CCAUCAUUGGGUUAUGUAG |
| siRNA 4911 | 4911 | UACAUAACCCAAUGAUGGA | 10401 | UCCAUCAUUGGGUUAUGUA |
| siRNA 4912 | 4912 | ACAUAACCCAAUGAUGGAG | 10402 | CUCCAUCAUUGGGUUAUGU |
| siRNA 4913 | 4913 | CAUAACCCAAUGAUGGAGG | 10403 | CCUCCAUCAUUGGGUUAUG |
| siRNA 4914 | 4914 | AUAACCCAAUGAUGGAGGG | 10404 | CCCUCCAUCAUUGGGUUAU |
| siRNA 4915 | 4915 | UAACCCAAUGAUGGAGGGA | 10405 | UCCCUCCAUCAUUGGGUUA |
| siRNA 4916 | 4916 | AACCCAAUGAUGGAGGGAA | 10406 | UUCCCUCCAUCAUUGGGUU |
| siRNA 4917 | 4917 | ACCCAAUGAUGGAGGGAAA | 10407 | UUUCCCUCCAUCAUUGGGU |
| siRNA 4918 | 4918 | CCCAAUGAUGGAGGGAAAA | 10408 | UUUUCCCUCCAUCAUUGGG |
| siRNA 4919 | 4919 | CCAAUGAUGGAGGGAAAAA | 10409 | UUUUUCCCUCCAUCAUUGG |
| siRNA 4920 | 4920 | CAAUGAUGGAGGGAAAAAG | 10410 | CUUUUUCCCUCCAUCAUUG |
| siRNA 4921 | 4921 | AAUGAUGGAGGGAAAAAGG | 10411 | CCUUUUUCCCUCCAUCAUU |
| siRNA 4922 | 4922 | AUGAUGGAGGGAAAAAGGG | 10412 | CCCUUUUUCCCUCCAUCAU |
| siRNA 4923 | 4923 | UGAUGGAGGGAAAAAGGGC | 10413 | GCCCUUUUUCCCUCCAUCA |
| siRNA 4924 | 4924 | GAUGGAGGGAAAAAGGGCA | 10414 | UGCCCUUUUUCCCUCCAUC |
| siRNA 4925 | 4925 | AUGGAGGGAAAAAGGGCAU | 10415 | AUGCCCUUUUUCCCUCCAU |
| siRNA 4926 | 4926 | UGGAGGGAAAAAGGGCAUG | 10416 | CAUGCCCUUUUUCCCUCCA |
| siRNA 4927 | 4927 | GGAGGGAAAAAGGGCAUGU | 10417 | ACAUGCCCUUUUUCCCUCC |
| siRNA 4928 | 4928 | GAGGGAAAAAGGGCAUGUA | 10418 | UACAUGCCCUUUUUCCCUC |
| siRNA 4929 | 4929 | AGGGAAAAAGGGCAUGUAU | 10419 | AUACAUGCCCUUUUUCCCU |
| siRNA 4930 | 4930 | GGGAAAAAGGGCAUGUAUC | 10420 | GAUACAUGCCCUUUUUCCC |
| siRNA 4931 | 4931 | GGAAAAAGGGCAUGUAUCU | 10421 | AGAUACAUGCCCUUUUUCC |
| siRNA 4932 | 4932 | GAAAAAGGGCAUGUAUCUC | 10422 | GAGAUACAUGCCCUUUUUC |
| siRNA 4933 | 4933 | AAAAAGGGCAUGUAUCUCA | 10423 | UGAGAUACAUGCCCUUUUU |
| siRNA 4934 | 4934 | AAAAGGGCAUGUAUCUCAU | 10424 | AUGAGAUACAUGCCCUUUU |
| siRNA 4935 | 4935 | AAAGGGCAUGUAUCUCAUU | 10425 | AAUGAGAUACAUGCCCUUU |
| siRNA 4936 | 4936 | AAGGGCAUGUAUCUCAUUC | 10426 | GAAUGAGAUACAUGCCCUU |
| siRNA 4937 | 4937 | AGGGCAUGUAUCUCAUUCA | 10427 | UGAAUGAGAUACAUGCCCU |
| siRNA 4938 | 4938 | GGGCAUGUAUCUCAUUCAG | 10428 | CUGAAUGAGAUACAUGCCC |
| siRNA 4939 | 4939 | GGCAUGUAUCUCAUUCAGA | 10429 | UCUGAAUGAGAUACAUGCC |
| siRNA 4940 | 4940 | GCAUGUAUCUCAUUCAGAU | 10430 | AUCUGAAUGAGAUACAUGC |
| siRNA 4941 | 4941 | CAUGUAUCUCAUUCAGAUG | 10431 | CAUCUGAAUGAGAUACAUG |
| siRNA 4942 | 4942 | AUGUAUCUCAUUCAGAUGU | 10432 | ACAUCUGAAUGAGAUACAU |
| siRNA 4943 | 4943 | UGUAUCUCAUUCAGAUGUG | 10433 | CACAUCUGAAUGAGAUACA |
| siRNA 4944 | 4944 | GUAUCUCAUUCAGAUGUGC | 10434 | GCACAUCUGAAUGAGAUAC |
| siRNA 4945 | 4945 | UAUCUCAUUCAGAUGUGCC | 10435 | GGCACAUCUGAAUGAGAUA |
| siRNA 4946 | 4946 | AUCUCAUUCAGAUGUGCCU | 10436 | AGGCACAUCUGAAUGAGAU |
| siRNA 4947 | 4947 | UCUCAUUCAGAUGUGCCUU | 10437 | AAGGCACAUCUGAAUGAGA |
| siRNA 4948 | 4948 | CUCAUUCAGAUGUGCCUUU | 10438 | AAAGGCACAUCUGAAUGAG |
| siRNA 4949 | 4949 | UCAUUCAGAUGUGCCUUUU | 10439 | AAAAGGCACAUCUGAAUGA |
| siRNA 4950 | 4950 | CAUUCAGAUGUGCCUUUUG | 10440 | CAAAAGGCACAUCUGAAUG |
| siRNA 4951 | 4951 | AUUCAGAUGUGCCUUUUGU | 10441 | ACAAAAGGCACAUCUGAAU |
| siRNA 4952 | 4952 | UUCAGAUGUGCCUUUUGUU | 10442 | AACAAAAGGCACAUCUGAA |
| siRNA 4953 | 4953 | UCAGAUGUGCCUUUUGUUU | 10443 | AAACAAAAGGCACAUCUGA |
| siRNA 4954 | 4954 | CAGAUGUGCCUUUUGUUUU | 10444 | AAAACAAAAGGCACAUCUG |
| siRNA 4955 | 4955 | AGAUGUGCCUUUUGUUUUU | 10445 | AAAAACAAAAGGCACAUCU |
| siRNA 4956 | 4956 | GAUGUGCCUUUUGUUUUUG | 10446 | CAAAAACAAAAGGCACAUC |
| siRNA 4957 | 4957 | AUGUGCCUUUUGUUUUUGC | 10447 | GCAAAAACAAAAGGCACAU |
| siRNA 4958 | 4958 | UGUGCCUUUUGUUUUUGCA | 10448 | UGCAAAAACAAAAGGCACA |
| siRNA 4959 | 4959 | GUGCCUUUUGUUUUUGCAG | 10449 | CUGCAAAAACAAAAGGCAC |
| siRNA 4960 | 4960 | UGCCUUUUGUUUUUGCAGA | 10450 | UCUGCAAAAACAAAAGGCA |
| siRNA 4961 | 4961 | GCCUUUUGUUUUUGCAGAC | 10451 | GUCUGCAAAAACAAAAGGC |
| siRNA 4962 | 4962 | CCUUUUGUUUUUGCAGACU | 10452 | AGUCUGCAAAAACAAAAGG |
| siRNA 4963 | 4963 | CUUUUGUUUUUGCAGACUA | 10453 | UAGUCUGCAAAAACAAAAG |
| siRNA 4964 | 4964 | UUUUGUUUUUGCAGACUAU | 10454 | AUAGUCUGCAAAAACAAAA |
| siRNA 4965 | 4965 | UUUGUUUUUGCAGACUAUG | 10455 | CAUAGUCUGCAAAAACAAA |
| siRNA 4966 | 4966 | UUGUUUUUGCAGACUAUGA | 10456 | UCAUAGUCUGCAAAAACAA |
| siRNA 4967 | 4967 | UGUUUUUGCAGACUAUGAC | 10457 | GUCAUAGUCUGCAAAAACA |
| siRNA 4968 | 4968 | GUUUUUGCAGACUAUGACG | 10458 | CGUCAUAGUCUGCAAAAAC |
| siRNA 4969 | 4969 | UUUUUGCAGACUAUGACGU | 10459 | ACGUCAUAGUCUGCAAAAA |
| siRNA 4970 | 4970 | UUUUGCAGACUAUGACGUC | 10460 | GACGUCAUAGUCUGCAAAA |
| siRNA 4971 | 4971 | UUUGCAGACUAUGACGUCU | 10461 | AGACGUCAUAGUCUGCAAA |
| siRNA 4972 | 4972 | UUGCAGACUAUGACGUCUU | 10462 | AAGACGUCAUAGUCUGCAA |
| siRNA 4973 | 4973 | UGCAGACUAUGACGUCUUU | 10463 | AAAGACGUCAUAGUCUGCA |
| siRNA 4974 | 4974 | GCAGACUAUGACGUCUUUA | 10464 | UAAAGACGUCAUAGUCUGC |
| siRNA 4975 | 4975 | CAGACUAUGACGUCUUUAG | 10465 | CUAAAGACGUCAUAGUCUG |
| siRNA 4976 | 4976 | AGACUAUGACGUCUUUAGC | 10466 | GCUAAAGACGUCAUAGUCU |
| siRNA 4977 | 4977 | GACUAUGACGUCUUUAGCU | 10467 | AGCUAAAGACGUCAUAGUC |
| siRNA 4978 | 4978 | ACUAUGACGUCUUUAGCUA | 10468 | UAGCUAAAGACGUCAUAGU |
| siRNA 4979 | 4979 | CUAUGACGUCUUUAGCUAA | 10469 | UUAGCUAAAGACGUCAUAG |
| siRNA 4980 | 4980 | UAUGACGUCUUUAGCUAAU | 10470 | AUUAGCUAAAGACGUCAUA |
| siRNA 4981 | 4981 | AUGACGUCUUUAGCUAAUG | 10471 | CAUUAGCUAAAGACGUCAU |
| siRNA 4982 | 4982 | UGACGUCUUUAGCUAAUGA | 10472 | UCAUUAGCUAAAGACGUCA |
| siRNA 4983 | 4983 | GACGUCUUUAGCUAAUGAA | 10473 | UUCAUUAGCUAAAGACGUC |
| siRNA 4984 | 4984 | ACGUCUUUAGCUAAUGAAU | 10474 | AUUCAUUAGCUAAAGACGU |
| siRNA 4985 | 4985 | CGUCUUUAGCUAAUGAAUU | 10475 | AAUUCAUUAGCUAAAGACG |
| siRNA 4986 | 4986 | GUCUUUAGCUAAUGAAUUG | 10476 | CAAUUCAUUAGCUAAAGAC |
| siRNA 4987 | 4987 | UCUUUAGCUAAUGAAUUGC | 10477 | GCAAUUCAUUAGCUAAAGA |
| siRNA 4988 | 4988 | CUUUAGCUAAUGAAUUGCC | 10478 | GGCAAUUCAUUAGCUAAAG |
| siRNA 4989 | 4989 | UUUAGCUAAUGAAUUGCCU | 10479 | AGGCAAUUCAUUAGCUAAA |
| siRNA 4990 | 4990 | UUAGCUAAUGAAUUGCCUA | 10480 | UAGGCAAUUCAUUAGCUAA |
| siRNA 4991 | 4991 | UAGCUAAUGAAUUGCCUAU | 10481 | AUAGGCAAUUCAUUAGCUA |
| siRNA 4992 | 4992 | AGCUAAUGAAUUGCCUAUU | 10482 | AAUAGGCAAUUCAUUAGCU |
| siRNA 4993 | 4993 | GCUAAUGAAUUGCCUAUUG | 10483 | CAAUAGGCAAUUCAUUAGC |
| siRNA 4994 | 4994 | CUAAUGAAUUGCCUAUUGU | 10484 | ACAAUAGGCAAUUCAUUAG |
| siRNA 4995 | 4995 | UAAUGAAUUGCCUAUUGUU | 10485 | AACAAUAGGCAAUUCAUUA |
| siRNA 4996 | 4996 | AAUGAAUUGCCUAUUGUUA | 10486 | UAACAAUAGGCAAUUCAUU |
| siRNA 4997 | 4997 | AUGAAUUGCCUAUUGUUAU | 10487 | AUAACAAUAGGCAAUUCAU |
| siRNA 4998 | 4998 | UGAAUUGCCUAUUGUUAUG | 10488 | CAUAACAAUAGGCAAUUCA |
| siRNA 4999 | 4999 | GAAUUGCCUAUUGUUAUGG | 10489 | CCAUAACAAUAGGCAAUUC |
| siRNA 5000 | 5000 | AAUUGCCUAUUGUUAUGGA | 10490 | UCCAUAACAAUAGGCAAUU |
| siRNA 5001 | 5001 | AUUGCCUAUUGUUAUGGAA | 10491 | UUCCAUAACAAUAGGCAAU |
| siRNA 5002 | 5002 | UUGCCUAUUGUUAUGGAAA | 10492 | UUUCCAUAACAAUAGGCAA |
| siRNA 5003 | 5003 | UGCCUAUUGUUAUGGAAAA | 10493 | UUUUCCAUAACAAUAGGCA |
| siRNA 5004 | 5004 | GCCUAUUGUUAUGGAAAAC | 10494 | GUUUUCCAUAACAAUAGGC |
| siRNA 5005 | 5005 | CCUAUUGUUAUGGAAAACA | 10495 | UGUUUUCCAUAACAAUAGG |
| siRNA 5006 | 5006 | CUAUUGUUAUGGAAAACAG | 10496 | CUGUUUUCCAUAACAAUAG |
| siRNA 5007 | 5007 | UAUUGUUAUGGAAAACAGU | 10497 | ACUGUUUUCCAUAACAAUA |
| siRNA 5008 | 5008 | AUUGUUAUGGAAAACAGUU | 10498 | AACUGUUUUCCAUAACAAU |
| siRNA 5009 | 5009 | UUGUUAUGGAAAACAGUUA | 10499 | UAACUGUUUUCCAUAACAA |
| siRNA 5010 | 5010 | UGUUAUGGAAAACAGUUAA | 10500 | UUAACUGUUUUCCAUAACA |
| siRNA 5011 | 5011 | GUUAUGGAAAACAGUUAAU | 10501 | AUUAACUGUUUUCCAUAAC |
| siRNA 5012 | 5012 | UUAUGGAAAACAGUUAAUA | 10502 | UAUUAACUGUUUUCCAUAA |
| siRNA 5013 | 5013 | UAUGGAAAACAGUUAAUAU | 10503 | AUAUUAACUGUUUUCCAUA |
| siRNA 5014 | 5014 | AUGGAAAACAGUUAAUAUG | 10504 | CAUAUUAACUGUUUUCCAU |
| siRNA 5015 | 5015 | UGGAAAACAGUUAAUAUGC | 10505 | GCAUAUUAACUGUUUUCCA |
| siRNA 5016 | 5016 | GGAAAACAGUUAAUAUGCC | 10506 | GGCAUAUUAACUGUUUUCC |
| siRNA 5017 | 5017 | GAAAACAGUUAAUAUGCCA | 10507 | UGGCAUAUUAACUGUUUUC |
| siRNA 5018 | 5018 | AAAACAGUUAAUAUGCCAU | 10508 | AUGGCAUAUUAACUGUUUU |
| siRNA 5019 | 5019 | AAACAGUUAAUAUGCCAUG | 10509 | CAUGGCAUAUUAACUGUUU |
| siRNA 5020 | 5020 | AACAGUUAAUAUGCCAUGU | 10510 | ACAUGGCAUAUUAACUGUU |
| siRNA 5021 | 5021 | ACAGUUAAUAUGCCAUGUA | 10511 | UACAUGGCAUAUUAACUGU |
| siRNA 5022 | 5022 | CAGUUAAUAUGCCAUGUAU | 10512 | AUACAUGGCAUAUUAACUG |
| siRNA 5023 | 5023 | AGUUAAUAUGCCAUGUAUG | 10513 | CAUACAUGGCAUAUUAACU |
| siRNA 5024 | 5024 | GUUAAUAUGCCAUGUAUGU | 10514 | ACAUACAUGGCAUAUUAAC |
| siRNA 5025 | 5025 | UUAAUAUGCCAUGUAUGUA | 10515 | UACAUACAUGGCAUAUUAA |
| siRNA 5026 | 5026 | UAAUAUGCCAUGUAUGUAC | 10516 | GUACAUACAUGGCAUAUUA |
| siRNA 5027 | 5027 | AAUAUGCCAUGUAUGUACA | 10517 | UGUACAUACAUGGCAUAUU |
| siRNA 5028 | 5028 | AUAUGCCAUGUAUGUACAG | 10518 | CUGUACAUACAUGGCAUAU |
| siRNA 5029 | 5029 | UAUGCCAUGUAUGUACAGU | 10519 | ACUGUACAUACAUGGCAUA |
| siRNA 5030 | 5030 | AUGCCAUGUAUGUACAGUU | 10520 | AACUGUACAUACAUGGCAU |
| siRNA 5031 | 5031 | UGCCAUGUAUGUACAGUUU | 10521 | AAACUGUACAUACAUGGCA |
| siRNA 5032 | 5032 | GCCAUGUAUGUACAGUUUU | 10522 | AAAACUGUACAUACAUGGC |
| siRNA 5033 | 5033 | CCAUGUAUGUACAGUUUUG | 10523 | CAAAACUGUACAUACAUGG |
| siRNA 5034 | 5034 | CAUGUAUGUACAGUUUUGU | 10524 | ACAAAACUGUACAUACAUG |
| siRNA 5035 | 5035 | AUGUAUGUACAGUUUUGUU | 10525 | AACAAAACUGUACAUACAU |
| siRNA 5036 | 5036 | UGUAUGUACAGUUUUGUUU | 10526 | AAACAAAACUGUACAUACA |
| siRNA 5037 | 5037 | GUAUGUACAGUUUUGUUUA | 10527 | UAAACAAAACUGUACAUAC |
| siRNA 5038 | 5038 | UAUGUACAGUUUUGUUUAU | 10528 | AUAAACAAAACUGUACAUA |
| siRNA 5039 | 5039 | AUGUACAGUUUUGUUUAUA | 10529 | UAUAAACAAAACUGUACAU |
| siRNA 5040 | 5040 | UGUACAGUUUUGUUUAUAU | 10530 | AUAUAAACAAAACUGUACA |
| siRNA 5041 | 5041 | GUACAGUUUUGUUUAUAUU | 10531 | AAUAUAAACAAAACUGUAC |
| siRNA 5042 | 5042 | UACAGUUUUGUUUAUAUUG | 10532 | CAAUAUAAACAAAACUGUA |
| siRNA 5043 | 5043 | ACAGUUUUGUUUAUAUUGU | 10533 | ACAAUAUAAACAAAACUGU |
| siRNA 5044 | 5044 | CAGUUUUGUUUAUAUUGUA | 10534 | UACAAUAUAAACAAAACUG |
| siRNA 5045 | 5045 | AGUUUUGUUUAUAUUGUAU | 10535 | AUACAAUAUAAACAAAACU |
| siRNA 5046 | 5046 | GUUUUGUUUAUAUUGUAUA | 10536 | UAUACAAUAUAAACAAAAC |
| siRNA 5047 | 5047 | UUUUGUUUAUAUUGUAUAU | 10537 | AUAUACAAUAUAAACAAAA |
| siRNA 5048 | 5048 | UUUGUUUAUAUUGUAUAUU | 10538 | AAUAUACAAUAUAAACAAA |
| siRNA 5049 | 5049 | UUGUUUAUAUUGUAUAUUU | 10539 | AAAUAUACAAUAUAAACAA |
| siRNA 5050 | 5050 | UGUUUAUAUUGUAUAUUUA | 10540 | UAAAUAUACAAUAUAAACA |
| siRNA 5051 | 5051 | GUUUAUAUUGUAUAUUUAA | 10541 | UUAAAUAUACAAUAUAAAC |
| siRNA 5052 | 5052 | UUUAUAUUGUAUAUUUAAA | 10542 | UUUAAAUAUACAAUAUAAA |
| siRNA 5053 | 5053 | UUAUAUUGUAUAUUUAAAG | 10543 | CUUUAAAUAUACAAUAUAA |
| siRNA 5054 | 5054 | UAUAUUGUAUAUUUAAAGA | 10544 | UCUUUAAAUAUACAAUAUA |
| siRNA 5055 | 5055 | AUAUUGUAUAUUUAAAGAU | 10545 | AUCUUUAAAUAUACAAUAU |
| siRNA 5056 | 5056 | UAUUGUAUAUUUAAAGAUA | 10546 | UAUCUUUAAAUAUACAAUA |
| siRNA 5057 | 5057 | AUUGUAUAUUUAAAGAUAC | 10547 | GUAUCUUUAAAUAUACAAU |
| siRNA 5058 | 5058 | UUGUAUAUUUAAAGAUACU | 10548 | AGUAUCUUUAAAUAUACAA |
| siRNA 5059 | 5059 | UGUAUAUUUAAAGAUACUG | 10549 | CAGUAUCUUUAAAUAUACA |
| siRNA 5060 | 5060 | GUAUAUUUAAAGAUACUGC | 10550 | GCAGUAUCUUUAAAUAUAC |
| siRNA 5061 | 5061 | UAUAUUUAAAGAUACUGCU | 10551 | AGCAGUAUCUUUAAAUAUA |
| siRNA 5062 | 5062 | AUAUUUAAAGAUACUGCUA | 10552 | UAGCAGUAUCUUUAAAUAU |
| siRNA 5063 | 5063 | UAUUUAAAGAUACUGCUAA | 10553 | UUAGCAGUAUCUUUAAAUA |
| siRNA 5064 | 5064 | AUUUAAAGAUACUGCUAAU | 10554 | AUUAGCAGUAUCUUUAAAU |
| siRNA 5065 | 5065 | UUUAAAGAUACUGCUAAUA | 10555 | UAUUAGCAGUAUCUUUAAA |
| siRNA 5066 | 5066 | UUAAAGAUACUGCUAAUAA | 10556 | UUAUUAGCAGUAUCUUUAA |
| siRNA 5067 | 5067 | UAAAGAUACUGCUAAUAAC | 10557 | GUUAUUAGCAGUAUCUUUA |
| siRNA 5068 | 5068 | AAAGAUACUGCUAAUAACC | 10558 | GGUUAUUAGCAGUAUCUUU |
| siRNA 5069 | 5069 | AAGAUACUGCUAAUAACCU | 10559 | AGGUUAUUAGCAGUAUCUU |
| siRNA 5070 | 5070 | AGAUACUGCUAAUAACCUA | 10560 | UAGGUUAUUAGCAGUAUCU |
| siRNA 5071 | 5071 | GAUACUGCUAAUAACCUAU | 10561 | AUAGGUUAUUAGCAGUAUC |
| siRNA 5072 | 5072 | AUACUGCUAAUAACCUAUA | 10562 | UAUAGGUUAUUAGCAGUAU |
| siRNA 5073 | 5073 | UACUGCUAAUAACCUAUAU | 10563 | AUAUAGGUUAUUAGCAGUA |
| siRNA 5074 | 5074 | ACUGCUAAUAACCUAUAUA | 10564 | UAUAUAGGUUAUUAGCAGU |
| siRNA 5075 | 5075 | CUGCUAAUAACCUAUAUAA | 10565 | UUAUAUAGGUUAUUAGCAG |
| siRNA 5076 | 5076 | UGCUAAUAACCUAUAUAAA | 10566 | UUUAUAUAGGUUAUUAGCA |
| siRNA 5077 | 5077 | GCUAAUAACCUAUAUAAAU | 10567 | AUUUAUAUAGGUUAUUAGC |
| siRNA 5078 | 5078 | CUAAUAACCUAUAUAAAUU | 10568 | AAUUUAUAUAGGUUAUUAG |
| siRNA 5079 | 5079 | UAAUAACCUAUAUAAAUUU | 10569 | AAAUUUAUAUAGGUUAUUA |
| siRNA 5080 | 5080 | AAUAACCUAUAUAAAUUUA | 10570 | UAAAUUUAUAUAGGUUAUU |
| siRNA 5081 | 5081 | AUAACCUAUAUAAAUUUAA | 10571 | UUAAAUUUAUAUAGGUUAU |
| siRNA 5082 | 5082 | UAACCUAUAUAAAUUUAAG | 10572 | CUUAAAUUUAUAUAGGUUA |
| siRNA 5083 | 5083 | AACCUAUAUAAAUUUAAGU | 10573 | ACUUAAAUUUAUAUAGGUU |
| siRNA 5084 | 5084 | ACCUAUAUAAAUUUAAGUG | 10574 | CACUUAAAUUUAUAUAGGU |
| siRNA 5085 | 5085 | CCUAUAUAAAUUUAAGUGA | 10575 | UCACUUAAAUUUAUAUAGG |
| siRNA 5086 | 5086 | CUAUAUAAAUUUAAGUGAC | 10576 | GUCACUUAAAUUUAUAUAG |
| siRNA 5087 | 5087 | UAUAUAAAUUUAAGUGACU | 10577 | AGUCACUUAAAUUUAUAUA |
| siRNA 5088 | 5088 | AUAUAAAUUUAAGUGACUU | 10578 | AAGUCACUUAAAUUUAUAU |
| siRNA 5089 | 5089 | UAUAAAUUUAAGUGACUUG | 10579 | CAAGUCACUUAAAUUUAUA |
| siRNA 5090 | 5090 | AUAAAUUUAAGUGACUUGA | 10580 | UCAAGUCACUUAAAUUUAU |
| siRNA 5091 | 5091 | UAAAUUUAAGUGACUUGAG | 10581 | CUCAAGUCACUUAAAUUUA |
| siRNA 5092 | 5092 | AAAUUUAAGUGACUUGAGG | 10582 | CCUCAAGUCACUUAAAUUU |
| siRNA 5093 | 5093 | AAUUUAAGUGACUUGAGGC | 10583 | GCCUCAAGUCACUUAAAUU |
| siRNA 5094 | 5094 | AUUUAAGUGACUUGAGGCC | 10584 | GGCCUCAAGUCACUUAAAU |
| siRNA 5095 | 5095 | UUUAAGUGACUUGAGGCCU | 10585 | AGGCCUCAAGUCACUUAAA |
| siRNA 5096 | 5096 | UUAAGUGACUUGAGGCCUA | 10586 | UAGGCCUCAAGUCACUUAA |
| siRNA 5097 | 5097 | UAAGUGACUUGAGGCCUAU | 10587 | AUAGGCCUCAAGUCACUUA |
| siRNA 5098 | 5098 | AAGUGACUUGAGGCCUAUA | 10588 | UAUAGGCCUCAAGUCACUU |
| siRNA 5099 | 5099 | AGUGACUUGAGGCCUAUAA | 10589 | UUAUAGGCCUCAAGUCACU |
| siRNA 5100 | 5100 | GUGACUUGAGGCCUAUAAU | 10590 | AUUAUAGGCCUCAAGUCAC |
| siRNA 5101 | 5101 | UGACUUGAGGCCUAUAAUA | 10591 | UAUUAUAGGCCUCAAGUCA |
| siRNA 5102 | 5102 | GACUUGAGGCCUAUAAUAC | 10592 | GUAUUAUAGGCCUCAAGUC |
| siRNA 5103 | 5103 | ACUUGAGGCCUAUAAUACA | 10593 | UGUAUUAUAGGCCUCAAGU |
| siRNA 5104 | 5104 | CUUGAGGCCUAUAAUACAA | 10594 | UUGUAUUAUAGGCCUCAAG |
| siRNA 5105 | 5105 | UUGAGGCCUAUAAUACAAU | 10595 | AUUGUAUUAUAGGCCUCAA |
| siRNA 5106 | 5106 | UGAGGCCUAUAAUACAAUC | 10596 | GAUUGUAUUAUAGGCCUCA |
| siRNA 5107 | 5107 | GAGGCCUAUAAUACAAUCU | 10597 | AGAUUGUAUUAUAGGCCUC |
| siRNA 5108 | 5108 | AGGCCUAUAAUACAAUCUG | 10598 | CAGAUUGUAUUAUAGGCCU |
| siRNA 5109 | 5109 | GGCCUAUAAUACAAUCUGC | 10599 | GCAGAUUGUAUUAUAGGCC |
| siRNA 5110 | 5110 | GCCUAUAAUACAAUCUGCU | 10600 | AGCAGAUUGUAUUAUAGGC |
| siRNA 5111 | 5111 | CCUAUAAUACAAUCUGCUA | 10601 | UAGCAGAUUGUAUUAUAGG |
| siRNA 5112 | 5112 | CUAUAAUACAAUCUGCUAC | 10602 | GUAGCAGAUUGUAUUAUAG |
| siRNA 5113 | 5113 | UAUAAUACAAUCUGCUACU | 10603 | AGUAGCAGAUUGUAUUAUA |
| siRNA 5114 | 5114 | AUAAUACAAUCUGCUACUU | 10604 | AAGUAGCAGAUUGUAUUAU |
| siRNA 5115 | 5115 | UAAUACAAUCUGCUACUUU | 10605 | AAAGUAGCAGAUUGUAUUA |
| siRNA 5116 | 5116 | AAUACAAUCUGCUACUUUA | 10606 | UAAAGUAGCAGAUUGUAUU |
| siRNA 5117 | 5117 | AUACAAUCUGCUACUUUAC | 10607 | GUAAAGUAGCAGAUUGUAU |
| siRNA 5118 | 5118 | UACAAUCUGCUACUUUACU | 10608 | AGUAAAGUAGCAGAUUGUA |
| siRNA 5119 | 5119 | ACAAUCUGCUACUUUACUA | 10609 | UAGUAAAGUAGCAGAUUGU |
| siRNA 5120 | 5120 | CAAUCUGCUACUUUACUAA | 10610 | UUAGUAAAGUAGCAGAUUG |
| siRNA 5121 | 5121 | AAUCUGCUACUUUACUAAU | 10611 | AUUAGUAAAGUAGCAGAUU |
| siRNA 5122 | 5122 | AUCUGCUACUUUACUAAUU | 10612 | AAUUAGUAAAGUAGCAGAU |
| siRNA 5123 | 5123 | UCUGCUACUUUACUAAUUC | 10613 | GAAUUAGUAAAGUAGCAGA |
| siRNA 5124 | 5124 | CUGCUACUUUACUAAUUCA | 10614 | UGAAUUAGUAAAGUAGCAG |
| siRNA 5125 | 5125 | UGCUACUUUACUAAUUCAU | 10615 | AUGAAUUAGUAAAGUAGCA |
| siRNA 5126 | 5126 | GCUACUUUACUAAUUCAUA | 10616 | UAUGAAUUAGUAAAGUAGC |
| siRNA 5127 | 5127 | CUACUUUACUAAUUCAUAA | 10617 | UUAUGAAUUAGUAAAGUAG |
| siRNA 5128 | 5128 | UACUUUACUAAUUCAUAAA | 10618 | UUUAUGAAUUAGUAAAGUA |
| siRNA 5129 | 5129 | ACUUUACUAAUUCAUAAAU | 10619 | AUUUAUGAAUUAGUAAAGU |
| siRNA 5130 | 5130 | CUUUACUAAUUCAUAAAUU | 10620 | AAUUUAUGAAUUAGUAAAG |
| siRNA 5131 | 5131 | UUUACUAAUUCAUAAAUUC | 10621 | GAAUUUAUGAAUUAGUAAA |
| siRNA 5132 | 5132 | UUACUAAUUCAUAAAUUCA | 10622 | UGAAUUUAUGAAUUAGUAA |
| siRNA 5133 | 5133 | UACUAAUUCAUAAAUUCAA | 10623 | UUGAAUUUAUGAAUUAGUA |
| siRNA 5134 | 5134 | ACUAAUUCAUAAAUUCAAA | 10624 | UUUGAAUUUAUGAAUUAGU |
| siRNA 5135 | 5135 | CUAAUUCAUAAAUUCAAAA | 10625 | UUUUGAAUUUAUGAAUUAG |
| siRNA 5136 | 5136 | UAAUUCAUAAAUUCAAAAA | 10626 | UUUUUGAAUUUAUGAAUUA |
| siRNA 5137 | 5137 | AAUUCAUAAAUUCAAAAAA | 10627 | UUUUUUGAAUUUAUGAAUU |
| siRNA 5138 | 5138 | AUUCAUAAAUUCAAAAAAA | 10628 | UUUUUUUGAAUUUAUGAAU |
| siRNA 5139 | 5139 | UUCAUAAAUUCAAAAAAAA | 10629 | UUUUUUUUGAAUUUAUGAA |
| siRNA 5140 | 5140 | UCAUAAAUUCAAAAAAAAU | 10630 | AUUUUUUUUGAAUUUAUGA |
| siRNA 5141 | 5141 | CAUAAAUUCAAAAAAAAUU | 10631 | AAUUUUUUUUGAAUUUAUG |
| siRNA 5142 | 5142 | AUAAAUUCAAAAAAAAUUC | 10632 | GAAUUUUUUUUGAAUUUAU |
| siRNA 5143 | 5143 | UAAAUUCAAAAAAAAUUCU | 10633 | AGAAUUUUUUUUGAAUUUA |
| siRNA 5144 | 5144 | AAAUUCAAAAAAAAUUCUA | 10634 | UAGAAUUUUUUUUGAAUUU |
| siRNA 5145 | 5145 | AAUUCAAAAAAAAUUCUAU | 10635 | AUAGAAUUUUUUUUGAAUU |
| siRNA 5146 | 5146 | AUUCAAAAAAAAUUCUAUG | 10636 | CAUAGAAUUUUUUUUGAAU |
| siRNA 5147 | 5147 | UUCAAAAAAAAUUCUAUGG | 10637 | CCAUAGAAUUUUUUUUGAA |
| siRNA 5148 | 5148 | UCAAAAAAAAUUCUAUGGC | 10638 | GCCAUAGAAUUUUUUUUGA |
| siRNA 5149 | 5149 | CAAAAAAAAUUCUAUGGCA | 10639 | UGCCAUAGAAUUUUUUUUG |
| siRNA 5150 | 5150 | AAAAAAAAUUCUAUGGCAU | 10640 | AUGCCAUAGAAUUUUUUUU |
| siRNA 5151 | 5151 | AAAAAAAUUCUAUGGCAUA | 10641 | UAUGCCAUAGAAUUUUUUU |
| siRNA 5152 | 5152 | AAAAAAUUCUAUGGCAUAG | 10642 | CUAUGCCAUAGAAUUUUUU |
| siRNA 5153 | 5153 | AAAAAUUCUAUGGCAUAGG | 10643 | CCUAUGCCAUAGAAUUUUU |
| siRNA 5154 | 5154 | AAAAUUCUAUGGCAUAGGA | 10644 | UCCUAUGCCAUAGAAUUUU |
| siRNA 5155 | 5155 | AAAUUCUAUGGCAUAGGAA | 10645 | UUCCUAUGCCAUAGAAUUU |
| siRNA 5156 | 5156 | AAUUCUAUGGCAUAGGAAC | 10646 | GUUCCUAUGCCAUAGAAUU |
| siRNA 5157 | 5157 | AUUCUAUGGCAUAGGAACC | 10647 | GGUUCCUAUGCCAUAGAAU |
| siRNA 5158 | 5158 | UUCUAUGGCAUAGGAACCA | 10648 | UGGUUCCUAUGCCAUAGAA |
| siRNA 5159 | 5159 | UCUAUGGCAUAGGAACCAA | 10649 | UUGGUUCCUAUGCCAUAGA |
| siRNA 5160 | 5160 | CUAUGGCAUAGGAACCAAC | 10650 | GUUGGUUCCUAUGCCAUAG |
| siRNA 5161 | 5161 | UAUGGCAUAGGAACCAACU | 10651 | AGUUGGUUCCUAUGCCAUA |
| siRNA 5162 | 5162 | AUGGCAUAGGAACCAACUG | 10652 | CAGUUGGUUCCUAUGCCAU |
| siRNA 5163 | 5163 | UGGCAUAGGAACCAACUGC | 10653 | GCAGUUGGUUCCUAUGCCA |
| siRNA 5164 | 5164 | GGCAUAGGAACCAACUGCC | 10654 | GGCAGUUGGUUCCUAUGCC |
| siRNA 5165 | 5165 | GCAUAGGAACCAACUGCCU | 10655 | AGGCAGUUGGUUCCUAUGC |
| siRNA 5166 | 5166 | CAUAGGAACCAACUGCCUU | 10656 | AAGGCAGUUGGUUCCUAUG |
| siRNA 5167 | 5167 | AUAGGAACCAACUGCCUUG | 10657 | CAAGGCAGUUGGUUCCUAU |
| siRNA 5168 | 5168 | UAGGAACCAACUGCCUUGC | 10658 | GCAAGGCAGUUGGUUCCUA |
| siRNA 5169 | 5169 | AGGAACCAACUGCCUUGCC | 10659 | GGCAAGGCAGUUGGUUCCU |
| siRNA 5170 | 5170 | GGAACCAACUGCCUUGCCU | 10660 | AGGCAAGGCAGUUGGUUCC |
| siRNA 5171 | 5171 | GAACCAACUGCCUUGCCUU | 10661 | AAGGCAAGGCAGUUGGUUC |
| siRNA 5172 | 5172 | AACCAACUGCCUUGCCUUC | 10662 | GAAGGCAAGGCAGUUGGUU |
| siRNA 5173 | 5173 | ACCAACUGCCUUGCCUUCA | 10663 | UGAAGGCAAGGCAGUUGGU |
| siRNA 5174 | 5174 | CCAACUGCCUUGCCUUCAA | 10664 | UUGAAGGCAAGGCAGUUGG |
| siRNA 5175 | 5175 | CAACUGCCUUGCCUUCAAG | 10665 | CUUGAAGGCAAGGCAGUUG |
| siRNA 5176 | 5176 | AACUGCCUUGCCUUCAAGA | 10666 | UCUUGAAGGCAAGGCAGUU |
| siRNA 5177 | 5177 | ACUGCCUUGCCUUCAAGAC | 10667 | GUCUUGAAGGCAAGGCAGU |
| siRNA 5178 | 5178 | CUGCCUUGCCUUCAAGACC | 10668 | GGUCUUGAAGGCAAGGCAG |
| siRNA 5179 | 5179 | UGCCUUGCCUUCAAGACCU | 10669 | AGGUCUUGAAGGCAAGGCA |
| siRNA 5180 | 5180 | GCCUUGCCUUCAAGACCUA | 10670 | UAGGUCUUGAAGGCAAGGC |
| siRNA 5181 | 5181 | CCUUGCCUUCAAGACCUAG | 10671 | CUAGGUCUUGAAGGCAAGG |
| siRNA 5182 | 5182 | CUUGCCUUCAAGACCUAGU | 10672 | ACUAGGUCUUGAAGGCAAG |
| siRNA 5183 | 5183 | UUGCCUUCAAGACCUAGUA | 10673 | UACUAGGUCUUGAAGGCAA |
| siRNA 5184 | 5184 | UGCCUUCAAGACCUAGUAA | 10674 | UUACUAGGUCUUGAAGGCA |
| siRNA 5185 | 5185 | GCCUUCAAGACCUAGUAAC | 10675 | GUUACUAGGUCUUGAAGGC |
| siRNA 5186 | 5186 | CCUUCAAGACCUAGUAACU | 10676 | AGUUACUAGGUCUUGAAGG |
| siRNA 5187 | 5187 | CUUCAAGACCUAGUAACUU | 10677 | AAGUUACUAGGUCUUGAAG |
| siRNA 5188 | 5188 | UUCAAGACCUAGUAACUUU | 10678 | AAAGUUACUAGGUCUUGAA |
| siRNA 5189 | 5189 | UCAAGACCUAGUAACUUUC | 10679 | GAAAGUUACUAGGUCUUGA |
| siRNA 5190 | 5190 | CAAGACCUAGUAACUUUCU | 10680 | AGAAAGUUACUAGGUCUUG |
| siRNA 5191 | 5191 | AAGACCUAGUAACUUUCUC | 10681 | GAGAAAGUUACUAGGUCUU |
| siRNA 5192 | 5192 | AGACCUAGUAACUUUCUCU | 10682 | AGAGAAAGUUACUAGGUCU |
| siRNA 5193 | 5193 | GACCUAGUAACUUUCUCUA | 10683 | UAGAGAAAGUUACUAGGUC |
| siRNA 5194 | 5194 | ACCUAGUAACUUUCUCUAU | 10684 | AUAGAGAAAGUUACUAGGU |
| siRNA 5195 | 5195 | CCUAGUAACUUUCUCUAUA | 10685 | UAUAGAGAAAGUUACUAGG |
| siRNA 5196 | 5196 | CUAGUAACUUUCUCUAUAA | 10686 | UUAUAGAGAAAGUUACUAG |
| siRNA 5197 | 5197 | UAGUAACUUUCUCUAUAAA | 10687 | UUUAUAGAGAAAGUUACUA |
| siRNA 5198 | 5198 | AGUAACUUUCUCUAUAAAU | 10688 | AUUUAUAGAGAAAGUUACU |
| siRNA 5199 | 5199 | GUAACUUUCUCUAUAAAUC | 10689 | GAUUUAUAGAGAAAGUUAC |
| siRNA 5200 | 5200 | UAACUUUCUCUAUAAAUCU | 10690 | AGAUUUAUAGAGAAAGUUA |
| siRNA 5201 | 5201 | AACUUUCUCUAUAAAUCUC | 10691 | GAGAUUUAUAGAGAAAGUU |
| siRNA 5202 | 5202 | ACUUUCUCUAUAAAUCUCG | 10692 | CGAGAUUUAUAGAGAAAGU |
| siRNA 5203 | 5203 | CUUUCUCUAUAAAUCUCGU | 10693 | ACGAGAUUUAUAGAGAAAG |
| siRNA 5204 | 5204 | UUUCUCUAUAAAUCUCGUG | 10694 | CACGAGAUUUAUAGAGAAA |
| siRNA 5205 | 5205 | UUCUCUAUAAAUCUCGUGU | 10695 | ACACGAGAUUUAUAGAGAA |
| siRNA 5206 | 5206 | UCUCUAUAAAUCUCGUGUU | 10696 | AACACGAGAUUUAUAGAGA |
| siRNA 5207 | 5207 | CUCUAUAAAUCUCGUGUUA | 10697 | UAACACGAGAUUUAUAGAG |
| siRNA 5208 | 5208 | UCUAUAAAUCUCGUGUUAA | 10698 | UUAACACGAGAUUUAUAGA |
| siRNA 5209 | 5209 | CUAUAAAUCUCGUGUUAAC | 10699 | GUUAACACGAGAUUUAUAG |
| siRNA 5210 | 5210 | UAUAAAUCUCGUGUUAACU | 10700 | AGUUAACACGAGAUUUAUA |
| siRNA 5211 | 5211 | AUAAAUCUCGUGUUAACUG | 10701 | CAGUUAACACGAGAUUUAU |
| siRNA 5212 | 5212 | UAAAUCUCGUGUUAACUGA | 10702 | UCAGUUAACACGAGAUUUA |
| siRNA 5213 | 5213 | AAAUCUCGUGUUAACUGAA | 10703 | UUCAGUUAACACGAGAUUU |
| siRNA 5214 | 5214 | AAUCUCGUGUUAACUGAAA | 10704 | UUUCAGUUAACACGAGAUU |
| siRNA 5215 | 5215 | AUCUCGUGUUAACUGAAAU | 10705 | AUUUCAGUUAACACGAGAU |
| siRNA 5216 | 5216 | UCUCGUGUUAACUGAAAUU | 10706 | AAUUUCAGUUAACACGAGA |
| siRNA 5217 | 5217 | CUCGUGUUAACUGAAAUUU | 10707 | AAAUUUCAGUUAACACGAG |
| siRNA 5218 | 5218 | UCGUGUUAACUGAAAUUUU | 10708 | AAAAUUUCAGUUAACACGA |
| siRNA 5219 | 5219 | CGUGUUAACUGAAAUUUUU | 10709 | AAAAAUUUCAGUUAACACG |
| siRNA 5220 | 5220 | GUGUUAACUGAAAUUUUUU | 10710 | AAAAAAUUUCAGUUAACAC |
| siRNA 5221 | 5221 | UGUUAACUGAAAUUUUUUU | 10711 | AAAAAAAUUUCAGUUAACA |
| siRNA 5222 | 5222 | GUUAACUGAAAUUUUUUUU | 10712 | AAAAAAAAUUUCAGUUAAC |
| siRNA 5223 | 5223 | UUAACUGAAAUUUUUUUUA | 10713 | UAAAAAAAAUUUCAGUUAA |
| siRNA 5224 | 5224 | UAACUGAAAUUUUUUUUAA | 10714 | UUAAAAAAAAUUUCAGUUA |
| siRNA 5225 | 5225 | AACUGAAAUUUUUUUUAAA | 10715 | UUUAAAAAAAAUUUCAGUU |
| siRNA 5226 | 5226 | ACUGAAAUUUUUUUUAAAU | 10716 | AUUUAAAAAAAAUUUCAGU |
| siRNA 5227 | 5227 | CUGAAAUUUUUUUUAAAUA | 10717 | UAUUUAAAAAAAAUUUCAG |
| siRNA 5228 | 5228 | UGAAAUUUUUUUUAAAUAU | 10718 | AUAUUUAAAAAAAAUUUCA |
| siRNA 5229 | 5229 | GAAAUUUUUUUUAAAUAUA | 10719 | UAUAUUUAAAAAAAAUUUC |
| siRNA 5230 | 5230 | AAAUUUUUUUUAAAUAUAU | 10720 | AUAUAUUUAAAAAAAAUUU |
| siRNA 5231 | 5231 | AAUUUUUUUUAAAUAUAUU | 10721 | AAUAUAUUUAAAAAAAAUU |
| siRNA 5232 | 5232 | AUUUUUUUUAAAUAUAUUU | 10722 | AAAUAUAUUUAAAAAAAAU |
| siRNA 5233 | 5233 | UUUUUUUUAAAUAUAUUUU | 10723 | AAAAUAUAUUUAAAAAAAA |
| siRNA 5234 | 5234 | UUUUUUUAAAUAUAUUUUU | 10724 | AAAAAUAUAUUUAAAAAAA |
| siRNA 5235 | 5235 | UUUUUUAAAUAUAUUUUUU | 10725 | AAAAAAUAUAUUUAAAAAA |
| siRNA 5236 | 5236 | UUUUUAAAUAUAUUUUUUA | 10726 | UAAAAAAUAUAUUUAAAAA |
| siRNA 5237 | 5237 | UUUUAAAUAUAUUUUUUAG | 10727 | CUAAAAAAUAUAUUUAAAA |
| siRNA 5238 | 5238 | UUUAAAUAUAUUUUUUAGA | 10728 | UCUAAAAAAUAUAUUUAAA |
| siRNA 5239 | 5239 | UUAAAUAUAUUUUUUAGAU | 10729 | AUCUAAAAAAUAUAUUUAA |
| siRNA 5240 | 5240 | UAAAUAUAUUUUUUAGAUU | 10730 | AAUCUAAAAAAUAUAUUUA |
| siRNA 5241 | 5241 | AAAUAUAUUUUUUAGAUUG | 10731 | CAAUCUAAAAAAUAUAUUU |
| siRNA 5242 | 5242 | AAUAUAUUUUUUAGAUUGG | 10732 | CCAAUCUAAAAAAUAUAUU |
| siRNA 5243 | 5243 | AUAUAUUUUUUAGAUUGGU | 10733 | ACCAAUCUAAAAAAUAUAU |
| siRNA 5244 | 5244 | UAUAUUUUUUAGAUUGGUA | 10734 | UACCAAUCUAAAAAAUAUA |
| siRNA 5245 | 5245 | AUAUUUUUUAGAUUGGUAA | 10735 | UUACCAAUCUAAAAAAUAU |
| siRNA 5246 | 5246 | UAUUUUUUAGAUUGGUAAU | 10736 | AUUACCAAUCUAAAAAAUA |
| siRNA 5247 | 5247 | AUUUUUUAGAUUGGUAAUA | 10737 | UAUUACCAAUCUAAAAAAU |
| siRNA 5248 | 5248 | UUUUUUAGAUUGGUAAUAU | 10738 | AUAUUACCAAUCUAAAAAA |
| siRNA 5249 | 5249 | UUUUUAGAUUGGUAAUAUU | 10739 | AAUAUUACCAAUCUAAAAA |
| siRNA 5250 | 5250 | UUUUAGAUUGGUAAUAUUU | 10740 | AAAUAUUACCAAUCUAAAA |
| siRNA 5251 | 5251 | UUUAGAUUGGUAAUAUUUA | 10741 | UAAAUAUUACCAAUCUAAA |
| siRNA 5252 | 5252 | UUAGAUUGGUAAUAUUUAA | 10742 | UUAAAUAUUACCAAUCUAA |
| siRNA 5253 | 5253 | UAGAUUGGUAAUAUUUAAA | 10743 | UUUAAAUAUUACCAAUCUA |
| siRNA 5254 | 5254 | AGAUUGGUAAUAUUUAAAC | 10744 | GUUUAAAUAUUACCAAUCU |
| siRNA 5255 | 5255 | GAUUGGUAAUAUUUAAACC | 10745 | GGUUUAAAUAUUACCAAUC |
| siRNA 5256 | 5256 | AUUGGUAAUAUUUAAACCA | 10746 | UGGUUUAAAUAUUACCAAU |
| siRNA 5257 | 5257 | UUGGUAAUAUUUAAACCAG | 10747 | CUGGUUUAAAUAUUACCAA |
| siRNA 5258 | 5258 | UGGUAAUAUUUAAACCAGC | 10748 | GCUGGUUUAAAUAUUACCA |
| siRNA 5259 | 5259 | GGUAAUAUUUAAACCAGCA | 10749 | UGCUGGUUUAAAUAUUACC |
| siRNA 5260 | 5260 | GUAAUAUUUAAACCAGCAA | 10750 | UUGCUGGUUUAAAUAUUAC |
| siRNA 5261 | 5261 | UAAUAUUUAAACCAGCAAA | 10751 | UUUGCUGGUUUAAAUAUUA |
| siRNA 5262 | 5262 | AAUAUUUAAACCAGCAAAU | 10752 | AUUUGCUGGUUUAAAUAUU |
| siRNA 5263 | 5263 | AUAUUUAAACCAGCAAAUA | 10753 | UAUUUGCUGGUUUAAAUAU |
| siRNA 5264 | 5264 | UAUUUAAACCAGCAAAUAC | 10754 | GUAUUUGCUGGUUUAAAUA |
| siRNA 5265 | 5265 | AUUUAAACCAGCAAAUACU | 10755 | AGUAUUUGCUGGUUUAAAU |
| siRNA 5266 | 5266 | UUUAAACCAGCAAAUACUU | 10756 | AAGUAUUUGCUGGUUUAAA |
| siRNA 5267 | 5267 | UUAAACCAGCAAAUACUUA | 10757 | UAAGUAUUUGCUGGUUUAA |
| siRNA 5268 | 5268 | UAAACCAGCAAAUACUUAA | 10758 | UUAAGUAUUUGCUGGUUUA |
| siRNA 5269 | 5269 | AAACCAGCAAAUACUUAAA | 10759 | UUUAAGUAUUUGCUGGUUU |
| siRNA 5270 | 5270 | AACCAGCAAAUACUUAAAG | 10760 | CUUUAAGUAUUUGCUGGUU |
| siRNA 5271 | 5271 | ACCAGCAAAUACUUAAAGC | 10761 | GCUUUAAGUAUUUGCUGGU |
| siRNA 5272 | 5272 | CCAGCAAAUACUUAAAGCU | 10762 | AGCUUUAAGUAUUUGCUGG |
| siRNA 5273 | 5273 | CAGCAAAUACUUAAAGCUU | 10763 | AAGCUUUAAGUAUUUGCUG |
| siRNA 5274 | 5274 | AGCAAAUACUUAAAGCUUU | 10764 | AAAGCUUUAAGUAUUUGCU |
| siRNA 5275 | 5275 | GCAAAUACUUAAAGCUUUA | 10765 | UAAAGCUUUAAGUAUUUGC |
| siRNA 5276 | 5276 | CAAAUACUUAAAGCUUUAU | 10766 | AUAAAGCUUUAAGUAUUUG |
| siRNA 5277 | 5277 | AAAUACUUAAAGCUUUAUU | 10767 | AAUAAAGCUUUAAGUAUUU |
| siRNA 5278 | 5278 | AAUACUUAAAGCUUUAUUA | 10768 | UAAUAAAGCUUUAAGUAUU |
| siRNA 5279 | 5279 | AUACUUAAAGCUUUAUUAA | 10769 | UUAAUAAAGCUUUAAGUAU |
| siRNA 5280 | 5280 | UACUUAAAGCUUUAUUAAA | 10770 | UUUAAUAAAGCUUUAAGUA |
| siRNA 5281 | 5281 | ACUUAAAGCUUUAUUAAAC | 10771 | GUUUAAUAAAGCUUUAAGU |
| siRNA 5282 | 5282 | CUUAAAGCUUUAUUAAACA | 10772 | UGUUUAAUAAAGCUUUAAG |
| siRNA 5283 | 5283 | UUAAAGCUUUAUUAAACAU | 10773 | AUGUUUAAUAAAGCUUUAA |
| siRNA 5284 | 5284 | UAAAGCUUUAUUAAACAUU | 10774 | AAUGUUUAAUAAAGCUUUA |
| siRNA 5285 | 5285 | AAAGCUUUAUUAAACAUUU | 10775 | AAAUGUUUAAUAAAGCUUU |
| siRNA 5286 | 5286 | AAGCUUUAUUAAACAUUUU | 10776 | AAAAUGUUUAAUAAAGCUU |
| siRNA 5287 | 5287 | AGCUUUAUUAAACAUUUUA | 10777 | UAAAAUGUUUAAUAAAGCU |
| siRNA 5288 | 5288 | GCUUUAUUAAACAUUUUAA | 10778 | UUAAAAUGUUUAAUAAAGC |
| siRNA 5289 | 5289 | CUUUAUUAAACAUUUUAAU | 10779 | AUUAAAAUGUUUAAUAAAG |
| siRNA 5290 | 5290 | UUUAUUAAACAUUUUAAUC | 10780 | GAUUAAAAUGUUUAAUAAA |
| siRNA 5291 | 5291 | UUAUUAAACAUUUUAAUCA | 10781 | UGAUUAAAAUGUUUAAUAA |
| siRNA 5292 | 5292 | UAUUAAACAUUUUAAUCAG | 10782 | CUGAUUAAAAUGUUUAAUA |
| siRNA 5293 | 5293 | AUUAAACAUUUUAAUCAGA | 10783 | UCUGAUUAAAAUGUUUAAU |
| siRNA 5294 | 5294 | UUAAACAUUUUAAUCAGAU | 10784 | AUCUGAUUAAAAUGUUUAA |
| siRNA 5295 | 5295 | UAAACAUUUUAAUCAGAUA | 10785 | UAUCUGAUUAAAAUGUUUA |
| siRNA 5296 | 5296 | AAACAUUUUAAUCAGAUAA | 10786 | UUAUCUGAUUAAAAUGUUU |
| siRNA 5297 | 5297 | AACAUUUUAAUCAGAUAAG | 10787 | CUUAUCUGAUUAAAAUGUU |
| siRNA 5298 | 5298 | ACAUUUUAAUCAGAUAAGU | 10788 | ACUUAUCUGAUUAAAAUGU |
| siRNA 5299 | 5299 | CAUUUUAAUCAGAUAAGUG | 10789 | CACUUAUCUGAUUAAAAUG |
| siRNA 5300 | 5300 | AUUUUAAUCAGAUAAGUGA | 10790 | UCACUUAUCUGAUUAAAAU |
| siRNA 5301 | 5301 | UUUUAAUCAGAUAAGUGAG | 10791 | CUCACUUAUCUGAUUAAAA |
| siRNA 5302 | 5302 | UUUAAUCAGAUAAGUGAGU | 10792 | ACUCACUUAUCUGAUUAAA |
| siRNA 5303 | 5303 | UUAAUCAGAUAAGUGAGUA | 10793 | UACUCACUUAUCUGAUUAA |
| siRNA 5304 | 5304 | UAAUCAGAUAAGUGAGUAA | 10794 | UUACUCACUUAUCUGAUUA |
| siRNA 5305 | 5305 | AAUCAGAUAAGUGAGUAAA | 10795 | UUUACUCACUUAUCUGAUU |
| siRNA 5306 | 5306 | AUCAGAUAAGUGAGUAAAG | 10796 | CUUUACUCACUUAUCUGAU |
| siRNA 5307 | 5307 | UCAGAUAAGUGAGUAAAGC | 10797 | GCUUUACUCACUUAUCUGA |
| siRNA 5308 | 5308 | CAGAUAAGUGAGUAAAGCU | 10798 | AGCUUUACUCACUUAUCUG |
| siRNA 5309 | 5309 | AGAUAAGUGAGUAAAGCUU | 10799 | AAGCUUUACUCACUUAUCU |
| siRNA 5310 | 5310 | GAUAAGUGAGUAAAGCUUU | 10800 | AAAGCUUUACUCACUUAUC |
| siRNA 5311 | 5311 | AUAAGUGAGUAAAGCUUUU | 10801 | AAAAGCUUUACUCACUUAU |
| siRNA 5312 | 5312 | UAAGUGAGUAAAGCUUUUA | 10802 | UAAAAGCUUUACUCACUUA |
| siRNA 5313 | 5313 | AAGUGAGUAAAGCUUUUAU | 10803 | AUAAAAGCUUUACUCACUU |
| siRNA 5314 | 5314 | AGUGAGUAAAGCUUUUAUU | 10804 | AAUAAAAGCUUUACUCACU |
| siRNA 5315 | 5315 | GUGAGUAAAGCUUUUAUUU | 10805 | AAAUAAAAGCUUUACUCAC |
| siRNA 5316 | 5316 | UGAGUAAAGCUUUUAUUUG | 10806 | CAAAUAAAAGCUUUACUCA |
| siRNA 5317 | 5317 | GAGUAAAGCUUUUAUUUGC | 10807 | GCAAAUAAAAGCUUUACUC |
| siRNA 5318 | 5318 | AGUAAAGCUUUUAUUUGCC | 10808 | GGCAAAUAAAAGCUUUACU |
| siRNA 5319 | 5319 | GUAAAGCUUUUAUUUGCCA | 10809 | UGGCAAAUAAAAGCUUUAC |
| siRNA 5320 | 5320 | UAAAGCUUUUAUUUGCCAU | 10810 | AUGGCAAAUAAAAGCUUUA |
| siRNA 5321 | 5321 | AAAGCUUUUAUUUGCCAUU | 10811 | AAUGGCAAAUAAAAGCUUU |
| siRNA 5322 | 5322 | AAGCUUUUAUUUGCCAUUU | 10812 | AAAUGGCAAAUAAAAGCUU |
| siRNA 5323 | 5323 | AGCUUUUAUUUGCCAUUUG | 10813 | CAAAUGGCAAAUAAAAGCU |
| siRNA 5324 | 5324 | GCUUUUAUUUGCCAUUUGG | 10814 | CCAAAUGGCAAAUAAAAGC |
| siRNA 5325 | 5325 | CUUUUAUUUGCCAUUUGGA | 10815 | UCCAAAUGGCAAAUAAAAG |
| siRNA 5326 | 5326 | UUUUAUUUGCCAUUUGGAU | 10816 | AUCCAAAUGGCAAAUAAAA |
| siRNA 5327 | 5327 | UUUAUUUGCCAUUUGGAUG | 10817 | CAUCCAAAUGGCAAAUAAA |
| siRNA 5328 | 5328 | UUAUUUGCCAUUUGGAUGC | 10818 | GCAUCCAAAUGGCAAAUAA |
| siRNA 5329 | 5329 | UAUUUGCCAUUUGGAUGCC | 10819 | GGCAUCCAAAUGGCAAAUA |
| siRNA 5330 | 5330 | AUUUGCCAUUUGGAUGCCU | 10820 | AGGCAUCCAAAUGGCAAAU |
| siRNA 5331 | 5331 | UUUGCCAUUUGGAUGCCUU | 10821 | AAGGCAUCCAAAUGGCAAA |
| siRNA 5332 | 5332 | UUGCCAUUUGGAUGCCUUC | 10822 | GAAGGCAUCCAAAUGGCAA |
| siRNA 5333 | 5333 | UGCCAUUUGGAUGCCUUCG | 10823 | CGAAGGCAUCCAAAUGGCA |
| siRNA 5334 | 5334 | GCCAUUUGGAUGCCUUCGU | 10824 | ACGAAGGCAUCCAAAUGGC |
| siRNA 5335 | 5335 | CCAUUUGGAUGCCUUCGUU | 10825 | AACGAAGGCAUCCAAAUGG |
| siRNA 5336 | 5336 | CAUUUGGAUGCCUUCGUUC | 10826 | GAACGAAGGCAUCCAAAUG |
| siRNA 5337 | 5337 | AUUUGGAUGCCUUCGUUCA | 10827 | UGAACGAAGGCAUCCAAAU |
| siRNA 5338 | 5338 | UUUGGAUGCCUUCGUUCAA | 10828 | UUGAACGAAGGCAUCCAAA |
| siRNA 5339 | 5339 | UUGGAUGCCUUCGUUCAAA | 10829 | UUUGAACGAAGGCAUCCAA |
| siRNA 5340 | 5340 | UGGAUGCCUUCGUUCAAAG | 10830 | CUUUGAACGAAGGCAUCCA |
| siRNA 5341 | 5341 | GGAUGCCUUCGUUCAAAGU | 10831 | ACUUUGAACGAAGGCAUCC |
| siRNA 5342 | 5342 | GAUGCCUUCGUUCAAAGUG | 10832 | CACUUUGAACGAAGGCAUC |
| siRNA 5343 | 5343 | AUGCCUUCGUUCAAAGUGA | 10833 | UCACUUUGAACGAAGGCAU |
| siRNA 5344 | 5344 | UGCCUUCGUUCAAAGUGAU | 10834 | AUCACUUUGAACGAAGGCA |
| siRNA 5345 | 5345 | GCCUUCGUUCAAAGUGAUA | 10835 | UAUCACUUUGAACGAAGGC |
| siRNA 5346 | 5346 | CCUUCGUUCAAAGUGAUAG | 10836 | CUAUCACUUUGAACGAAGG |
| siRNA 5347 | 5347 | CUUCGUUCAAAGUGAUAGA | 10837 | UCUAUCACUUUGAACGAAG |
| siRNA 5348 | 5348 | UUCGUUCAAAGUGAUAGAG | 10838 | CUCUAUCACUUUGAACGAA |
| siRNA 5349 | 5349 | UCGUUCAAAGUGAUAGAGU | 10839 | ACUCUAUCACUUUGAACGA |
| siRNA 5350 | 5350 | CGUUCAAAGUGAUAGAGUG | 10840 | CACUCUAUCACUUUGAACG |
| siRNA 5351 | 5351 | GUUCAAAGUGAUAGAGUGU | 10841 | ACACUCUAUCACUUUGAAC |
| siRNA 5352 | 5352 | UUCAAAGUGAUAGAGUGUU | 10842 | AACACUCUAUCACUUUGAA |
| siRNA 5353 | 5353 | UCAAAGUGAUAGAGUGUUU | 10843 | AAACACUCUAUCACUUUGA |
| siRNA 5354 | 5354 | CAAAGUGAUAGAGUGUUUU | 10844 | AAAACACUCUAUCACUUUG |
| siRNA 5355 | 5355 | AAAGUGAUAGAGUGUUUUG | 10845 | CAAAACACUCUAUCACUUU |
| siRNA 5356 | 5356 | AAGUGAUAGAGUGUUUUGC | 10846 | GCAAAACACUCUAUCACUU |
| siRNA 5357 | 5357 | AGUGAUAGAGUGUUUUGCU | 10847 | AGCAAAACACUCUAUCACU |
| siRNA 5358 | 5358 | GUGAUAGAGUGUUUUGCUG | 10848 | CAGCAAAACACUCUAUCAC |
| siRNA 5359 | 5359 | UGAUAGAGUGUUUUGCUGA | 10849 | UCAGCAAAACACUCUAUCA |
| siRNA 5360 | 5360 | GAUAGAGUGUUUUGCUGAU | 10850 | AUCAGCAAAACACUCUAUC |
| siRNA 5361 | 5361 | AUAGAGUGUUUUGCUGAUA | 10851 | UAUCAGCAAAACACUCUAU |
| siRNA 5362 | 5362 | UAGAGUGUUUUGCUGAUAG | 10852 | CUAUCAGCAAAACACUCUA |
| siRNA 5363 | 5363 | AGAGUGUUUUGCUGAUAGU | 10853 | ACUAUCAGCAAAACACUCU |
| siRNA 5364 | 5364 | GAGUGUUUUGCUGAUAGUG | 10854 | CACUAUCAGCAAAACACUC |
| siRNA 5365 | 5365 | AGUGUUUUGCUGAUAGUGC | 10855 | GCACUAUCAGCAAAACACU |
| siRNA 5366 | 5366 | GUGUUUUGCUGAUAGUGCU | 10856 | AGCACUAUCAGCAAAACAC |
| siRNA 5367 | 5367 | UGUUUUGCUGAUAGUGCUG | 10857 | CAGCACUAUCAGCAAAACA |
| siRNA 5368 | 5368 | GUUUUGCUGAUAGUGCUGU | 10858 | ACAGCACUAUCAGCAAAAC |
| siRNA 5369 | 5369 | UUUUGCUGAUAGUGCUGUA | 10859 | UACAGCACUAUCAGCAAAA |
| siRNA 5370 | 5370 | UUUGCUGAUAGUGCUGUAG | 10860 | CUACAGCACUAUCAGCAAA |
| siRNA 5371 | 5371 | UUGCUGAUAGUGCUGUAGC | 10861 | GCUACAGCACUAUCAGCAA |
| siRNA 5372 | 5372 | UGCUGAUAGUGCUGUAGCA | 10862 | UGCUACAGCACUAUCAGCA |
| siRNA 5373 | 5373 | GCUGAUAGUGCUGUAGCAG | 10863 | CUGCUACAGCACUAUCAGC |
| siRNA 5374 | 5374 | CUGAUAGUGCUGUAGCAGC | 10864 | GCUGCUACAGCACUAUCAG |
| siRNA 5375 | 5375 | UGAUAGUGCUGUAGCAGCA | 10865 | UGCUGCUACAGCACUAUCA |
| siRNA 5376 | 5376 | GAUAGUGCUGUAGCAGCAG | 10866 | CUGCUGCUACAGCACUAUC |
| siRNA 5377 | 5377 | AUAGUGCUGUAGCAGCAGU | 10867 | ACUGCUGCUACAGCACUAU |
| siRNA 5378 | 5378 | UAGUGCUGUAGCAGCAGUU | 10868 | AACUGCUGCUACAGCACUA |
| siRNA 5379 | 5379 | AGUGCUGUAGCAGCAGUUG | 10869 | CAACUGCUGCUACAGCACU |
| siRNA 5380 | 5380 | GUGCUGUAGCAGCAGUUGU | 10870 | ACAACUGCUGCUACAGCAC |
| siRNA 5381 | 5381 | UGCUGUAGCAGCAGUUGUA | 10871 | UACAACUGCUGCUACAGCA |
| siRNA 5382 | 5382 | GCUGUAGCAGCAGUUGUAA | 10872 | UUACAACUGCUGCUACAGC |
| siRNA 5383 | 5383 | CUGUAGCAGCAGUUGUAAA | 10873 | UUUACAACUGCUGCUACAG |
| siRNA 5384 | 5384 | UGUAGCAGCAGUUGUAAAG | 10874 | CUUUACAACUGCUGCUACA |
| siRNA 5385 | 5385 | GUAGCAGCAGUUGUAAAGU | 10875 | ACUUUACAACUGCUGCUAC |
| siRNA 5386 | 5386 | UAGCAGCAGUUGUAAAGUA | 10876 | UACUUUACAACUGCUGCUA |
| siRNA 5387 | 5387 | AGCAGCAGUUGUAAAGUAG | 10877 | CUACUUUACAACUGCUGCU |
| siRNA 5388 | 5388 | GCAGCAGUUGUAAAGUAGC | 10878 | GCUACUUUACAACUGCUGC |
| siRNA 5389 | 5389 | CAGCAGUUGUAAAGUAGCC | 10879 | GGCUACUUUACAACUGCUG |
| siRNA 5390 | 5390 | AGCAGUUGUAAAGUAGCCA | 10880 | UGGCUACUUUACAACUGCU |
| siRNA 5391 | 5391 | GCAGUUGUAAAGUAGCCAA | 10881 | UUGGCUACUUUACAACUGC |
| siRNA 5392 | 5392 | CAGUUGUAAAGUAGCCAAA | 10882 | UUUGGCUACUUUACAACUG |
| siRNA 5393 | 5393 | AGUUGUAAAGUAGCCAAAA | 10883 | UUUUGGCUACUUUACAACU |
| siRNA 5394 | 5394 | GUUGUAAAGUAGCCAAAAG | 10884 | CUUUUGGCUACUUUACAAC |
| siRNA 5395 | 5395 | UUGUAAAGUAGCCAAAAGC | 10885 | GCUUUUGGCUACUUUACAA |
| siRNA 5396 | 5396 | UGUAAAGUAGCCAAAAGCC | 10886 | GGCUUUUGGCUACUUUACA |
| siRNA 5397 | 5397 | GUAAAGUAGCCAAAAGCCA | 10887 | UGGCUUUUGGCUACUUUAC |
| siRNA 5398 | 5398 | UAAAGUAGCCAAAAGCCAC | 10888 | GUGGCUUUUGGCUACUUUA |
| siRNA 5399 | 5399 | AAAGUAGCCAAAAGCCACG | 10889 | CGUGGCUUUUGGCUACUUU |
| siRNA 5400 | 5400 | AAGUAGCCAAAAGCCACGU | 10890 | ACGUGGCUUUUGGCUACUU |
| siRNA 5401 | 5401 | AGUAGCCAAAAGCCACGUU | 10891 | AACGUGGCUUUUGGCUACU |
| siRNA 5402 | 5402 | GUAGCCAAAAGCCACGUUG | 10892 | CAACGUGGCUUUUGGCUAC |
| siRNA 5403 | 5403 | UAGCCAAAAGCCACGUUGU | 10893 | ACAACGUGGCUUUUGGCUA |
| siRNA 5404 | 5404 | AGCCAAAAGCCACGUUGUU | 10894 | AACAACGUGGCUUUUGGCU |
| siRNA 5405 | 5405 | GCCAAAAGCCACGUUGUUU | 10895 | AAACAACGUGGCUUUUGGC |
| siRNA 5406 | 5406 | CCAAAAGCCACGUUGUUUA | 10896 | UAAACAACGUGGCUUUUGG |
| siRNA 5407 | 5407 | CAAAAGCCACGUUGUUUAU | 10897 | AUAAACAACGUGGCUUUUG |
| siRNA 5408 | 5408 | AAAAGCCACGUUGUUUAUU | 10898 | AAUAAACAACGUGGCUUUU |
| siRNA 5409 | 5409 | AAAGCCACGUUGUUUAUUU | 10899 | AAAUAAACAACGUGGCUUU |
| siRNA 5410 | 5410 | AAGCCACGUUGUUUAUUUA | 10900 | UAAAUAAACAACGUGGCUU |
| siRNA 5411 | 5411 | AGCCACGUUGUUUAUUUAC | 10901 | GUAAAUAAACAACGUGGCU |
| siRNA 5412 | 5412 | GCCACGUUGUUUAUUUACU | 10902 | AGUAAAUAAACAACGUGGC |
| siRNA 5413 | 5413 | CCACGUUGUUUAUUUACUG | 10903 | CAGUAAAUAAACAACGUGG |
| siRNA 5414 | 5414 | CACGUUGUUUAUUUACUGG | 10904 | CCAGUAAAUAAACAACGUG |
| siRNA 5415 | 5415 | ACGUUGUUUAUUUACUGGU | 10905 | ACCAGUAAAUAAACAACGU |
| siRNA 5416 | 5416 | CGUUGUUUAUUUACUGGUU | 10906 | AACCAGUAAAUAAACAACG |
| siRNA 5417 | 5417 | GUUGUUUAUUUACUGGUUU | 10907 | AAACCAGUAAAUAAACAAC |
| siRNA 5418 | 5418 | UUGUUUAUUUACUGGUUUG | 10908 | CAAACCAGUAAAUAAACAA |
| siRNA 5419 | 5419 | UGUUUAUUUACUGGUUUGU | 10909 | ACAAACCAGUAAAUAAACA |
| siRNA 5420 | 5420 | GUUUAUUUACUGGUUUGUG | 10910 | CACAAACCAGUAAAUAAAC |
| siRNA 5421 | 5421 | UUUAUUUACUGGUUUGUGG | 10911 | CCACAAACCAGUAAAUAAA |
| siRNA 5422 | 5422 | UUAUUUACUGGUUUGUGGC | 10912 | GCCACAAACCAGUAAAUAA |
| siRNA 5423 | 5423 | UAUUUACUGGUUUGUGGCC | 10913 | GGCCACAAACCAGUAAAUA |
| siRNA 5424 | 5424 | AUUUACUGGUUUGUGGCCU | 10914 | AGGCCACAAACCAGUAAAU |
| siRNA 5425 | 5425 | UUUACUGGUUUGUGGCCUU | 10915 | AAGGCCACAAACCAGUAAA |
| siRNA 5426 | 5426 | UUACUGGUUUGUGGCCUUU | 10916 | AAAGGCCACAAACCAGUAA |
| siRNA 5427 | 5427 | UACUGGUUUGUGGCCUUUU | 10917 | AAAAGGCCACAAACCAGUA |
| siRNA 5428 | 5428 | ACUGGUUUGUGGCCUUUUA | 10918 | UAAAAGGCCACAAACCAGU |
| siRNA 5429 | 5429 | CUGGUUUGUGGCCUUUUAC | 10919 | GUAAAAGGCCACAAACCAG |
| siRNA 5430 | 5430 | UGGUUUGUGGCCUUUUACU | 10920 | AGUAAAAGGCCACAAACCA |
| siRNA 5431 | 5431 | GGUUUGUGGCCUUUUACUG | 10921 | CAGUAAAAGGCCACAAACC |
| siRNA 5432 | 5432 | GUUUGUGGCCUUUUACUGU | 10922 | ACAGUAAAAGGCCACAAAC |
| siRNA 5433 | 5433 | UUUGUGGCCUUUUACUGUG | 10923 | CACAGUAAAAGGCCACAAA |
| siRNA 5434 | 5434 | UUGUGGCCUUUUACUGUGC | 10924 | GCACAGUAAAAGGCCACAA |
| siRNA 5435 | 5435 | UGUGGCCUUUUACUGUGCU | 10925 | AGCACAGUAAAAGGCCACA |
| siRNA 5436 | 5436 | GUGGCCUUUUACUGUGCUU | 10926 | AAGCACAGUAAAAGGCCAC |
| siRNA 5437 | 5437 | UGGCCUUUUACUGUGCUUU | 10927 | AAAGCACAGUAAAAGGCCA |
| siRNA 5438 | 5438 | GGCCUUUUACUGUGCUUUG | 10928 | CAAAGCACAGUAAAAGGCC |
| siRNA 5439 | 5439 | GCCUUUUACUGUGCUUUGU | 10929 | ACAAAGCACAGUAAAAGGC |
| siRNA 5440 | 5440 | CCUUUUACUGUGCUUUGUA | 10930 | UACAAAGCACAGUAAAAGG |
| siRNA 5441 | 5441 | CUUUUACUGUGCUUUGUAU | 10931 | AUACAAAGCACAGUAAAAG |
| siRNA 5442 | 5442 | UUUUACUGUGCUUUGUAUC | 10932 | GAUACAAAGCACAGUAAAA |
| siRNA 5443 | 5443 | UUUACUGUGCUUUGUAUCA | 10933 | UGAUACAAAGCACAGUAAA |
| siRNA 5444 | 5444 | UUACUGUGCUUUGUAUCAG | 10934 | CUGAUACAAAGCACAGUAA |
| siRNA 5445 | 5445 | UACUGUGCUUUGUAUCAGA | 10935 | UCUGAUACAAAGCACAGUA |
| siRNA 5446 | 5446 | ACUGUGCUUUGUAUCAGAG | 10936 | CUCUGAUACAAAGCACAGU |
| siRNA 5447 | 5447 | CUGUGCUUUGUAUCAGAGU | 10937 | ACUCUGAUACAAAGCACAG |
| siRNA 5448 | 5448 | UGUGCUUUGUAUCAGAGUU | 10938 | AACUCUGAUACAAAGCACA |
| siRNA 5449 | 5449 | GUGCUUUGUAUCAGAGUUC | 10939 | GAACUCUGAUACAAAGCAC |
| siRNA 5450 | 5450 | UGCUUUGUAUCAGAGUUCU | 10940 | AGAACUCUGAUACAAAGCA |
| siRNA 5451 | 5451 | GCUUUGUAUCAGAGUUCUU | 10941 | AAGAACUCUGAUACAAAGC |
| siRNA 5452 | 5452 | CUUUGUAUCAGAGUUCUUA | 10942 | UAAGAACUCUGAUACAAAG |
| siRNA 5453 | 5453 | UUUGUAUCAGAGUUCUUAA | 10943 | UUAAGAACUCUGAUACAAA |
| siRNA 5454 | 5454 | UUGUAUCAGAGUUCUUAAC | 10944 | GUUAAGAACUCUGAUACAA |
| siRNA 5455 | 5455 | UGUAUCAGAGUUCUUAACA | 10945 | UGUUAAGAACUCUGAUACA |
| siRNA 5456 | 5456 | GUAUCAGAGUUCUUAACAA | 10946 | UUGUUAAGAACUCUGAUAC |
| siRNA 5457 | 5457 | UAUCAGAGUUCUUAACAAG | 10947 | CUUGUUAAGAACUCUGAUA |
| siRNA 5458 | 5458 | AUCAGAGUUCUUAACAAGA | 10948 | UCUUGUUAAGAACUCUGAU |
| siRNA 5459 | 5459 | UCAGAGUUCUUAACAAGAU | 10949 | AUCUUGUUAAGAACUCUGA |
| siRNA 5460 | 5460 | CAGAGUUCUUAACAAGAUU | 10950 | AAUCUUGUUAAGAACUCUG |
| siRNA 5461 | 5461 | AGAGUUCUUAACAAGAUUA | 10951 | UAAUCUUGUUAAGAACUCU |
| siRNA 5462 | 5462 | GAGUUCUUAACAAGAUUAA | 10952 | UUAAUCUUGUUAAGAACUC |
| siRNA 5463 | 5463 | AGUUCUUAACAAGAUUAAU | 10953 | AUUAAUCUUGUUAAGAACU |
| siRNA 5464 | 5464 | GUUCUUAACAAGAUUAAUA | 10954 | UAUUAAUCUUGUUAAGAAC |
| siRNA 5465 | 5465 | UUCUUAACAAGAUUAAUAA | 10955 | UUAUUAAUCUUGUUAAGAA |
| siRNA 5466 | 5466 | UCUUAACAAGAUUAAUAAA | 10956 | UUUAUUAAUCUUGUUAAGA |
| siRNA 5467 | 5467 | CUUAACAAGAUUAAUAAAU | 10957 | AUUUAUUAAUCUUGUUAAG |
| siRNA 5468 | 5468 | UUAACAAGAUUAAUAAAUC | 10958 | GAUUUAUUAAUCUUGUUAA |
| siRNA 5469 | 5469 | UAACAAGAUUAAUAAAUCA | 10959 | UGAUUUAUUAAUCUUGUUA |
| siRNA 5470 | 5470 | AACAAGAUUAAUAAAUCAC | 10960 | GUGAUUUAUUAAUCUUGUU |
| siRNA 5471 | 5471 | ACAAGAUUAAUAAAUCACC | 10961 | GGUGAUUUAUUAAUCUUGU |
| siRNA 5472 | 5472 | CAAGAUUAAUAAAUCACCC | 10962 | GGGUGAUUUAUUAAUCUUG |
| siRNA 5473 | 5473 | AAGAUUAAUAAAUCACCCC | 10963 | GGGGUGAUUUAUUAAUCUU |
| siRNA 5474 | 5474 | AGAUUAAUAAAUCACCCCA | 10964 | UGGGGUGAUUUAUUAAUCU |
| siRNA 5475 | 5475 | GAUUAAUAAAUCACCCCAG | 10965 | CUGGGGUGAUUUAUUAAUC |
| siRNA 5476 | 5476 | AUUAAUAAAUCACCCCAGU | 10966 | ACUGGGGUGAUUUAUUAAU |
| siRNA 5477 | 5477 | UUAAUAAAUCACCCCAGUC | 10967 | GACUGGGGUGAUUUAUUAA |
| siRNA 5478 | 5478 | UAAUAAAUCACCCCAGUCU | 10968 | AGACUGGGGUGAUUUAUUA |
| siRNA 5479 | 5479 | AAUAAAUCACCCCAGUCUU | 10969 | AAGACUGGGGUGAUUUAUU |
| siRNA 5480 | 5480 | AUAAAUCACCCCAGUCUUA | 10970 | UAAGACUGGGGUGAUUUAU |
| siRNA 5481 | 5481 | UAAAUCACCCCAGUCUUAA | 10971 | UUAAGACUGGGGUGAUUUA |
| siRNA 5482 | 5482 | AAAUCACCCCAGUCUUAAU | 10972 | AUUAAGACUGGGGUGAUUU |
| siRNA 5483 | 5483 | AAUCACCCCAGUCUUAAUU | 10973 | AAUUAAGACUGGGGUGAUU |
| siRNA 5484 | 5484 | AUCACCCCAGUCUUAAUUU | 10974 | AAAUUAAGACUGGGGUGAU |
| siRNA 5485 | 5485 | UCACCCCAGUCUUAAUUUU | 10975 | AAAAUUAAGACUGGGGUGA |
| siRNA 5486 | 5486 | CACCCCAGUCUUAAUUUUU | 10976 | AAAAAUUAAGACUGGGGUG |
| siRNA 5487 | 5487 | ACCCCAGUCUUAAUUUUUA | 10977 | UAAAAAUUAAGACUGGGGU |
| siRNA 5488 | 5488 | CCCCAGUCUUAAUUUUUAA | 10978 | UUAAAAAUUAAGACUGGGG |
| siRNA 5489 | 5489 | CCCAGUCUUAAUUUUUAAA | 10979 | UUUAAAAAUUAAGACUGGG |
| siRNA 5490 | 5490 | CCAGUCUUAAUUUUUAAAA | 10980 | UUUUAAAAAUUAAGACUGG |

| SEQ ID | |
|---|---|
| NO: | 5′ to 3′ Sequence |
| 11253 | AGAAGCGGGCCAGCGCCGCCGGGAAAGGAGGTCGCCGCCCGGGGTCGCCCGGGCTTGCGGG |
| | TCGCCGCGCTTCCTCTGCGGGCGCTGCGGGAGGCGAGGGCCGCCTCGGCGGAGGAAGCCGA |
| | CCCCGGGGTCTCCGCCAGCCCGCCGGCGCCGCCTCCGAGCCGCCTCGGCCGTAGCCTCGGCC |
| | CGGGCGGGAGGCGGCGGCCGCCGGCGAGGCGAGGCGGCCCGCGCCCTGCCTGTCAGGCCAC |
| | CGGCCCGGCCCGCGGGCTGCCCCCGATGCGGAGGCGCTGTCGCCGGGGCCATGCAGCAGGC |
| | GCCGCAGCCTTACGAGTTCTTCAGCGAGGAGAACAGTCCGAAATGGCGGGGACTGTTGGTCT |
| | CGGCCCTGCGGAAGGTTCAGGAACAAGTGCATCCCACTCTCTCAGCTAATGAAGAGTCTCTC |
| | TATTATATTGAAGAGCTGATTTTTCAGCTGCTTAATAAATTATGCATGGCCCAGCCAAGGACT |
| | GTTCAAGATGTAGAGGAGCGAGTTCAGAAGACCTTTCCTCACCCAATTGATAAATGGGCCAT |
| | TGCTGATGCACAATCTGCTATAGAAAAACGAAAACGAAGAAATCCTCTTTTACTGCCTGTGG |
| | ACAAAATCCATCCTTCGTTGAAGGAAGTATTAGGGTACAAAGTGGACTACCATGTATCCCTA |
| | TATATTGTGGCTGTACTAGAGTATATCTCAGCTGATATTTTAAAATTGGCTGGTAATTATGTT |
| | TTTAATATCCGGCATTATGAAATATCTCAGCAGGACATTAAAGTGTCAATGTGTGCGGATAA |
| | GGTTTTGATGGACATGTTTGATCAGGATGACATAGGTTTGGTTTCTCTCTGTGAAGATGAACC |
| | TAGTTCTTCTGGTGAATTAAACTACTATGATCTTGTCAGAACTGAAATCGCAGAAGAAAGAC |
| | AGTATCTACGGGAATTAAATATGATCATAAAAGTGTTTCGAGAAGCCTTTCTTTCTGATAGA |
| | AAGCTGTTTAAACCTTCTGATATCGAAAAGATTTTTAGTAACATTTCAGATATACATGAATTG |
| | ACTGTGAAACTTTTAGGTTTGATTGAAGACACAGTTGAAATGACTGATGAAAGCAGTCCTCA |
| | TCCCTTAGCTGGCAGCTGTTTTGAAGATTTGGCAGAAGAGCAAGCATTTGATCCTTATGAAA |
| | CATTATCACAGGACATTCTTTCACCAGAGTTTCATGAACATTTCAATAAATTGATGGCCAGA |
| | CCTGCAGTTGCTCTACACTTTCAGTCCATTGCTGATGGTTTTAAAGAGGCAGTTCGTTATGTC |
| | CTTCCACGTCTTATGCTGGTGCCAGTGTATCACTGTTGGCACTACTTTGAGTTACTAAAGCAA |
| | TTGAAAGCATGTAGTGAAGAACAAGAAGACAGAGAATGTTTGAACCAAGCTATTACTGCTC |
| | TCATGAATCTCCAAGGTAGCATGGACCGAATTTACAAGCAGTATTCACCTAGACGTCGACCT |
| | GGAGATCCTGTTTGCCCTTTTTATAGTCACCAATTAAGAAGCAAACACCTGGCTATCAAAAA |
| | AATGAATGAAATTCAGAAAAATATCGATGGATGGGAAGGCAAAGATATTGGACAGTGTTGT |
| | AATGAATTCATTATGGAGGGACCATTGACAAGAATCGGTGCCAAACATGAACGGCATATTTT |
| | TCTGTTTGATGGCTTAATGATCAGTTGTAAACCTAATCATGGCCAGACTCGGCTTCCAGGTTA |
| | CAGTAGTGCAGAATACAGGTTAAAAGAAAAATTTGTCATGAGGAAAATACAAATTTGTGAT |
| | AAAGAAGATACTTGTGAGCACAAGCATGCATTTGAATTAGTATCCAAAGATGAGAACAGCA |
| | TAATATTTGCTGCTAAGTCTGCTGAAGAAAAAAACAACTGGATGGCAGCCCTTATTTCTCTTC |
| | ATTATCGTAGTACTCTAGATCGAATGTTAGATTCAGTATTATTGAAAGAAGAAAATGAGCAA |
| | CCACTGAGATTACCAAGTCCTGAAGTATATCGTTTTGTAGTAAAAGACTCTGAGGAAAACAT |
| | TGTTTTTGAAGACAACTTGCAAAGTAGAAGTGGCATCCCCATTATTAAAGGAGGAACTGTAG |
| | TGAAATTAATTGAAAGGTTAACATATCATATGTATGCAGATCCCAATTTTGTTCGTACTTTTC |
| | TTACCACATATCGTTCATTTTGTAAACCACAGGAATTGCTGAGCTTACTGATTGAACGGTTTG |
| | AAATTCCAGAGCCAGAACCTACTGACGCAGACAAATTGGCAATAGAGAAAGGCGAGCAGCC |
| | AATCAGTGCAGACCTTAAAAGATTTCGCAAGGAATATGTCCAACCAGTACAACTTAGGATCT |
| | TAAATGTATTTCGGCATTGGGTTGAACATCATTTTTATGACTTTGAAAGAGACTTGGAATTGC |
| | TTGAAAGACTAGAATCCTTCATTTCAAGTGTAAGAGGGAAAGCTATGAAAAAATGGGTAGA |
| | GTCAATTGCTAAGATCATCAGGAGGAAGAAGCAAGCTCAGGCAAACGGAGTAAGCCATAAT |
| | ATTACCTTTGAAAGTCCACCTCCACCAATTGAATGGCATATCAGCAAACCAGGACAGTTTGA |
| | AACATTTGATCTCATGACACTTCATCCAATAGAAATTGCACGTCAGCTGACACTTTTGGAGTC |
| | TGATCTTTACAGGAAAGTTCAACCGTCTGAACTTGTAGGGAGTGTGTGGACCAAAGAAGATA |
| | AAGAAATAAATTCTCCAAATTTATTAAAAATGATTCGCCATACCACAAATCTCACCCTCTGG |
| | TTTGAAAAATGCATTGTGGAAGCAGAAAATTTTGAAGAACGGGTGGCAGTACTAAGTAGAA |
| | TTATAGAAATTCTGCAAGTTTTTCAAGATTTGAATAATTTCAATGGCGTATTGGAGATAGTCA |
| | GTGCAGTAAATTCAGTGTCAGTATACAGACTAGACCATACCTTTGAGGCACTGCAGGAAAGG |
| | AAAAGGAAAATTTTGGACGAAGCTGTGGAATTAAGTCAAGATCACTTTAAAAAATACCTAG |
| | TAAAACTTAAGTCAATCAATCCACCTTGTGTGCCTTTTTTTGGAATATATTTAACAAATATTC |
| | TGAAGACCGAAGAAGGGAATAATGATTTTTTAAAAAAGAAAGGGAAAGATTTAATCAATTT |
| | CAGTAAGAGGAGGAAAGTAGCTGAAATTACTGGAGAAATTCAGCAGTATCAGAATCAGCCT |
| | TACTGTTTACGGATAGAACCAGATATGAGGAGATTCTTTGAAAACCTTAACCCCATGGGAAG |
| | TGCATCTGAAAAAGAGTTTACAGATTATTTGTTCAACAAGTCACTAGAAATTGAACCTCGAA |
| | ACTGCAAACAGCCACCTCGATTTCCTAGGAAATCAACTTTTTCCTTAAAATCTCCTGGAATAA |
| | GGCCTAACACAGGCCGACATGGCTCTACCTCAGGTACTTTACGAGGTCACCCAACACCATTA |
| | GAAAGAGAACCATGTAAAATAAGCTTTAGTCGGATTGCTGAAACTGAGCTGGAATCAACAG |
| | TGTCAGCACCAACCTCTCCAAATACACCATCTACTCCACCAGTATCTGCTTCTTCAGACCTTA |
| | GTGTATTTTTAGATGTGGATCTCAACAGCTCCTGTGGCAGCAATAGCATCTTTGCTCCAGTGC |
| | TTTTGCCACATTCAAAGTCTTTCTTTAGTTCATGTGGTAGTTTACATAAACTAAGTGAAGAGC |
| | CCCTGATTCCTCCTCCTCTTCCTCCTCGAAAAAAGTTTGATCATGATGCTTCAAATTCCAAGG |
| | GAAATATGAAATCTGATGATGATCCTCCTGCTATTCCACCGAGACAGCCTCCTCCTCCAAAG |
| | GTAAAACCCAGAGTTCCTGTTCCTACTGGTGCATTTGATGGGCCTCTGCATAGTCCACCTCCG |
| | CCACCACCAAGAGATCCTCTTCCTGATACCCCTCCACCAGTTCCCCTTCGGCCTCCAGAACAC |
| | TTTATAAACTGTCCATTTAATCTTCAGCCACCTCCACTGGGGCATCTTCACAGAGATTCAGAC |
| | TGGCTCAGAGACATTAGTACGTGTCCAAATTCGCCAAGCACTCCTCCTAGCACACCCTCTCC |
| | AAGGGTACCGCGTCGATGCTATGTGCTCAGTTCTAGTCAGAATAATCTTGCTCATCCTCCAGC |
| | TCCCCCTGTTCCACCAAGGCAGAATTCAAGCCCTCATCTGCCAAAACTGCCACCAAAGACTT |
| | ACAAACGGGAGCTTTCGCACCCCCCATTGTACAGACTGCCTTTGCTAGAAAATGCAGAAACT |
| | CCCCAATGACCTTAGCCATATGTAGTCATTGACACTGGAATGGTATTTGTAAAGTTTTTTTTT |
| | TAATTTATTCAAAAAAAGACATAGTATTTTAGTACTTTTTACAAATAATGCTCTTACAAAAAT |
| | GCTACTGATCAAATAAGCTTTTAAGAATTGGAAAAATAAAAATACAAAAGTCCTTCACCATT |
| | ATCCTCAGGTGATCAGTAGCATTGCCTTGTCTTGGATCCTCAGTGCTGCCAAAAGGCCAGTA |
| | TAAAGAATTTATATTTGCACTGTAAACTCTGCAAAAATATGGTTTAAAGTGACATGATTGCA |
| | CTGAAAAGGGATAGTGCTTTTGTGAAATTTTTCAAATTTGAGTAATAGATGCCTTTTTAAGGC |
| | AGTGAATTTACACAAATATGGGAGGGGTATATGGTGTTACTGATTTTTAAACCTCTTTGACC |
| | ATCTTCTAGTTTTTACTTCTAGTTTTTACATCTAGGAGAATTGTGAATAACACCAACTGTTCTT |
| | AAACTCTTTAATGCCATGTCTTAAATGCCGGTATTTGCTGCTGAAGACAAAAATGAAAAGTA |
| | GGATGAAAATAATAGAATGGCACTGTAAGTGTTTATTATTTTGTCAAAATGTAAACAAAGAC |
| | TACATAACCCAATGATGGAGGGAAAAAGGGCATGTATCTCATTCAGATGTGCCTTTTGTTTT |
| | TGCAGACTATGACGTCTTTAGCTAATGAATTGCCTATTGTTATGGAAAACAGTTAATATGCC |
| | ATGTATGTACAGTTTTGTTTATATTGTATATTTAAAGATACTGCTAATAACCTATATAAATTT |
| | AAGTGACTTGAGGCCTATAATACAATCTGCTACTTTACTAATTCATAAATTCAAAAAAAATT |
| | CTATGGCATAGGAACCAACTGCCTTGCCTTCAAGACCTAGTAACTTTCTCTATAAATCTCGTG |
| | TTAACTGAAATTTTTTTTAAATATATTTTTTAGATTGGTAATATTTAAACCAGCAAATACTTA |
| | AAGCTTTATTAAACATTTTAATCAGATAAGTGAGTAAAGCTTTTATTTGCCATTTGGATGCCT |
| | TCGTTCAAAGTGATAGAGTGTTTTGCTGATAGTGCTGTAGCAGCAGTTGTAAAGTAGCCAAA |
| | AGCCACGTTGTTTATTTACTGGTTTGTGGCCTTTTACTGTGCTTTGTATCAGAGTTCTTAACAA |
| | GATTAATAAATCACCCCAGTCTTAATTTTTAAAA |

What is claimed is:

1. A composition comprising an oligonucleotide that targets SOS2 and when administered to a subject in an effective amount increases an estimated glomerular filtration rate, or decreases a creatinine, blood urea nitrogen, proteinuria microalbuminuria measurement, or urine albumin creatinine ratio.

2. The composition of claim 1, wherein the estimated glomerular filtration rate is increased, or the creatinine, blood urea nitrogen, proteinuria, microalbuminuria measurement or urine albumin creatinine ratio is decreased, by about 10% or more, as compared to prior to administration.

3. A composition comprising an oligonucleotide that targets SOS2 and when administered to a subject in an effective amount decreases a blood urate measurement.

4. The composition of claim 3, wherein the blood urate measurement is decreased by about 10% or more, as compared to prior to administration.

5. A composition comprising an oligonucleotide that targets SOS2 and when administered to a subject in an effective amount decreases a systolic blood pressure measurement, a diastolic blood pressure measurement, a mean arterial pressure, or a pulse pressure.

6. The composition of claim 5, wherein the systolic blood pressure measurement, diastolic blood pressure measurement, mean arterial pressure, or pulse pressure is decreased by about 10% or more, as compared to prior to administration.

7. A composition comprising an oligonucleotide that targets SOS2 and when administered to a subject in an effective amount decreases an intraocular pressure measurement, cup-disc ratio, optic nerve cupping, RPE pigmentation and reflectivity, drusen, Macular hemorrhage, choroidal neovascularization, edema, microaneurysms, intraretinal hemorrhage, macular ischemia, neovascularization, vitreous hemorrhage, or traction retinal detachment or increases a RNFL thickness or retinal thickness.

8. The composition of claim 7, wherein the intraocular pressure measurement, cup-disc ratio, optic nerve cupping, RPE pigmentation and reflectivity, drusen, Macular hemorrhage, choroidal neovascularization, edema, microaneurysms, intraretinal hemorrhage, macular ischemia, neovascularization, vitreous hemorrhage, or traction retinal detachment is decreased or the RNFL thickness or retinal thickness is increased by about 10% or more, as compared to prior to administration.

9. A composition comprising an oligonucleotide that targets SOS2 and when administered to a subject in an effective amount decreases a body mass index (BMI) measurement, a body weight measurement, a waist circumference measurement, a hip circumference measurement, a waist-hip ratio (WHR), a body fat percentage measurement, a hemoglobin A1C measurement, a blood glucose measurement, a glucose tolerance measurement, an insulin sensitivity measurement, a blood triglyceride measurement, or a non-HDL cholesterol measurement.

10. The composition of claim 9, wherein the body mass index (BMI) measurement, the body weight measurement, the waist circumference measurement, the hip circumference measurement, the waist-hip ratio (WHR), the body fat percentage measurement, the hemoglobin A1C measurement, the blood glucose measurement, the glucose tolerance measurement, the insulin sensitivity measurement, the blood triglyceride measurement, or the non-HDL cholesterol measurement is decreased by about 10% or more, as compared to prior to administration.

11. A composition comprising an oligonucleotide that targets SOS2 and when administered to a subject in an effective amount decreases an alanine aminotransferase, aspartate aminotransferase, liver fat percentage measurement, liver fibrosis score, NAFLD activity score, or blood gamma-glutamyl transferase measurement.

12. The composition of claim 11, wherein the alanine aminotransferase, aspartate aminotransferase, liver fat percentage measurement, liver fibrosis score, NAFLD activity score, or blood gamma-glutamyl transferase measurement is decreased by about 10% or more, as compared to prior to administration.

13. The composition of any one of claims 1-12, wherein the oligonucleotide comprises a small interfering RNA (siRNA) comprising a sense strand and an antisense strand.

14. The composition of claim 13, wherein the sense strand is 12-30 nucleosides in length.

15. The composition of claim 13, wherein the sense strand comprises the sequence of any one of SEQ ID NOs: 1-5490, or a nucleic acid sequence thereof having 1 or 2 nucleoside substitutions, additions, or deletions.

16. The composition of claim 15, wherein the sense strand comprises the sequence of any one of SEQ ID NOs: 1-5490.

17. The composition of claim 13, wherein the antisense strand is 12-30 nucleosides in length.

18. The composition of claim 13, wherein the antisense strand comprises the sequence of any one of SEQ ID NOs: 5491-10980, or a nucleic acid sequence thereof having 1 or 2 nucleoside substitutions, additions, or deletions.

19. The composition of claim 18, wherein the antisense strand comprises the sequence of any one of SEQ ID NOs: 5491-10980.

20. The composition of claim 13, wherein the sense or antisense strand comprises a sense or antisense sequence of an siRNA of any one of Tables 35-35, or a nucleic acid sequence thereof having 1 or 2 nucleoside substitutions, additions, or deletions.

21. The composition of claim 20, wherein the sense or antisense strand comprises a sense or antisense sequence of an siRNA of any one of Tables 15-25.

22. The composition of claim 13, wherein any one of the following is true with regard to the sense strand:
(a) all purines comprise 2′ fluoro modified purines, and all pyrimidines comprise a mixture of 2′ fluoro and 2′-O-methyl modified pyrimidines;
(b) all purines comprise 2′-O-methyl modified purines, and all pyrimidines comprise a mixture of 2′ fluoro and 2′-O-methyl modified pyrimidines;
(c) all purines comprise 2′ fluoro modified purines, and all pyrimidines comprise 2′-O-methyl modified pyrimidines;
(d) all pyrimidines comprise 2′ fluoro modified pyrimidines, and all purines comprise a mixture of 2′ fluoro and 2′-O-methyl modified purines;
(e) all pyrimidines comprise 2′-O-methyl modified pyrimidines, and all purines comprise a mixture of 2′ fluoro and 2′-O-methyl modified purines; or
(f) all pyrimidines comprise 2′ fluoro modified pyrimidines, and all purines comprise 2′-O-methyl modified purines.

23. The composition of claim 13, wherein any one of the following is true with regard to the antisense strand:
(a) all purines comprise 2′ fluoro modified purines, and all pyrimidines comprise a mixture of 2′ fluoro and 2′-O-methyl modified pyrimidines;
(b) all purines comprise 2′-O-methyl modified purines, and all pyrimidines comprise a mixture of 2′ fluoro and 2′-O-methyl modified pyrimidines;
(c) all purines comprise 2′-O-methyl modified purines, and all pyrimidines comprise 2′ fluoro modified pyrimidines;
(d) all pyrimidines comprise 2′ fluoro modified pyrimidines, and all purines comprise a mixture of 2′ fluoro and 2′-O-methyl modified purines;
(e) all pyrimidines comprise 2′-O-methyl modified pyrimidines, and all purines comprise a mixture of 2′ fluoro and 2′-O-methyl modified purines; or
(f) all pyrimidines comprise 2′-O-methyl modified pyrimidines, and all purines comprise 2′ fluoro modified purines.

24. A composition comprising an oligonucleotide that inhibits the expression of SOS2 wherein the oligonucleotide comprises an siRNA comprising a sense strand and an antisense strand, each strand is independently about 12-30 nucleosides in length, and at least one of the sense strand and the antisense strand comprises a nucleoside sequence comprising about 12-30 contiguous nucleosides of SEQ ID NO: 11253.

25. The composition of any one of claims 1-12, wherein the oligonucleotide comprises an antisense oligonucleotide (ASO).

26. A composition comprising an oligonucleotide that inhibits the expression of SOS2 wherein the oligonucleotide comprises an ASO that is complementary to a nucleoside sequence comprising about 12-30 contiguous nucleosides of SEQ ID NO: 11253.

27. The composition of claim 25, wherein the ASO is 12-30 nucleosides in length.

28. The composition of any one of claims 1-12, wherein the oligonucleotide comprises a modified internucleoside linkage.

29. The composition of claim 28, wherein the modified internucleoside linkage comprises alkylphosphonate, phosphorothioate, methylphosphonate, phosphorodithioate, alkylphosphonothioate, phosphoramidate, carbamate, carbonate, phosphate triester, acetamidate, or carboxymethyl ester, or a combination thereof.

30. The composition of claim 28, wherein the modified internucleoside linkage comprises one or more phosphorothioate linkages.

31. The composition of any one of claims 1-12, wherein the oligonucleotide comprises 2, 3, 4, 5, 6, 7, 8, 9, 10, 11, 12, 13, 14, 15, 16, 17, 18, 19, or 20 modified internucleoside linkages.

32. The composition of any one of claims 1-12, wherein the oligonucleotide comprises a modified nucleoside.

33. The composition of claim 32, wherein the modified nucleoside comprises a locked nucleic acid (LNA), hexitol nucleic acid (HLA), cyclohexene nucleic acid (CeNA), 2′-methoxyethyl, 2′-O-alkyl, 2′-O-allyl, 2′-O-allyl, 2′-fluoro, or 2′-deoxy, or a combination thereof.

34. The composition of claim 32, wherein the modified nucleoside comprises a LNA.

35. The composition of claim 32, wherein the modified nucleoside comprises a 2′,4′ constrained ethyl nucleic acid.

36. The composition of claim 32, wherein the modified nucleoside comprises a 2′-O-methyl nucleoside, 2′-deoxyfluoro nucleoside, 2′-O—N-methylacetamido (2′-O-NMA) nucleoside, a 2′-O-dimethylaminoethoxyethyl (2′-O-DMAEOE) nucleoside, 2′-O-aminopropyl (2′-O-AP) nucleoside, or 2′-ara-F, or a combination thereof.

37. The composition of claim 32, wherein the modified nucleoside comprises one or more 2′fluoro modified nucleosides.

38. The composition of claim 32, wherein the modified nucleoside comprises a 2′ O-alkyl modified nucleoside.

39. The composition of claim 32, wherein the oligonucleotide comprises a lipid attached at a 3′ or 5′ terminus of the oligonucleotide.

40. The composition of claim 39, wherein the lipid comprises cholesterol, myristoyl, palmitoyl, stearoyl, lithocholoyl, docosanoyl, docosahexaenoyl, myristyl, palmityl stearyl, or α-tocopherol, or a combination thereof.

41. The composition of claim 39, wherein the lipid comprises a 5′ hydrophobic moiety comprising any one of the following structures: [chemical structure]
wherein the dotted line indicates a covalent connection to the end of the 5′ end of the sense strand, n is 1-3, and R is an alkyl group containing 4-18 carbons.

42. The composition of any one of claims 1-12, wherein the oligonucleotide comprises 2, 3, 4, 5, 6, 7, 8, 9, 10, 11, 12, 13, 14, 15, 16, 17, 18, 19, 20, or 21 modified nucleosides.

43. The composition of any one of claims 1-12, wherein the oligonucleotide comprises an N-acetylgalactosamine (GalNAc) ligand, an arginine-glycine-aspartic acid (RGD) peptide, or a cholesterol ligand.

44. The composition of claim 43, wherein the oligonucleotide comprises a GalNAc ligand.

45. The composition of claim 44, wherein the GalNac ligand comprises [chemical structure]
wherein n is 1 or 2, and J is the oligonucleotide.

46. A method of treating chronic kidney disease, diabetic nephropathy, gout, hyperuricemia, hypertension, cerebrovascular disease, type 2 diabetes, metabolic syndrome, obesity, hyperlipidemia, hypertriglyceridemia, glaucoma, ocular hypertension, retinal diseases, age-related macular degeneration, choroidal neovascularization, geographic atrophy, diabetic retinopathy, non-alcoholic fatty liver disease, fibrotic liver disease, liver fibrosis, cirrhosis, or hair loss in a subject in need thereof comprising administering to the subject a composition according to any one of claims 1-12.

47. A composition comprising an oligonucleotide that targets SOS2, wherein the oligonucleotide comprises a small interfering RNA (siRNA) comprising a sense strand and an antisense strand; and
wherein the sense strand comprises the nucleoside sequence of any one of SEQ ID NOs: 1-5490 or a nucleic acid sequence thereof having 1 or 2 nucleoside substitutions, additions, or deletions;
or wherein the antisense strand comprises the nucleoside sequence of any one of SEQ ID NOs: 5491-10980 or a nucleic acid sequence thereof having 1 or 2 nucleoside substitutions, additions, or deletions.

48. A composition comprising a compound represented by Formula (I) or (II): [chemical structure]
or a salt thereof, wherein
J is an oligonucleotide targeting SOS comprising a small interfering RNA (siRNA) comprising a sense strand and an antisense strand;
each w is independently selected from any value from 1 to 20;
each v is independently selected from any value from 1 to 20;
n is selected from any value from 1 to 20;
m is selected from any value from 1 to 20;
z is selected from any value from 1 to 3, wherein
if z is 3, Y is C
if z is 2, Y is CR⁶, or
if z is 1, Y is C(R⁶)₂;
Q is selected from:
C₃₋₁₀ carbocycle optionally substituted with one or more substituents independently selected from halogen, —CN, —NO₂, —OR⁷, —SR⁷, —N(R⁷)₂, —C(O)R⁷, —C(O)N(R⁷)₂, —N(R⁷)C(O)R⁷, —N(R⁷)C(O)N(R⁷)₂, —OC(O)N(R⁷)₂, —N(R⁷)C(O)OR⁷, —C(O)OR⁷, —OC(O)R⁷, —S(O)R⁷, and C₁₋₆ alkyl, wherein the C₁₋₆ alkyl, is optionally substituted with one or more substituents independently selected from halogen, —CN, —OH, —SH, —NO₂, and —NH₂;
R¹ is a linker selected from:
—O—, —S—, —N(R⁷)—, —C(O)—, —C(O)N(R⁷)—, —N(R⁷)C(O)—, —N(R⁷)C(O)N(R⁷)—, —OC(O)N(R⁷)—, —N(R⁷)C(O)O—, —C(O)O—, —OC(O)—, —S(O)—, —S(O)₂—, —OS(O)₂—, —OP(O)(OR⁷)O—, —SP(O)(OR⁷)O—, —OP(S)(OR⁷)O—, —OP(O)(SR⁷)O—, —OP(O)(OR⁷)S—, —OP(O)(O⁻)O—, —SP(O)(O⁻)O—, —OP(S)(O⁻)O—, —OP(O)(S⁻)O—, —OP(O)(O⁻)S—, —OP(O)(OR⁷)NR⁷—, —OP(O)(N(R⁷)₂)NR⁷—, —OP(OR⁷)O—, —OP(N(R⁷)₂)O—, —OP(OR⁷)N(R⁷)—, and —OPN(R⁷)₂NR⁷—;
each R² is independently selected from:
C₁₋₆ alkyl optionally substituted with one or more substituents independently selected from halogen, —OR⁷, —SR⁷, —N(R⁷)₂, —C(O)R⁷, —C(O)N(R⁷)₂, —N(R⁷)C(O)R⁷, —N(R⁷)C(O)N(R⁷)₂, —OC(O)N(R⁷)₂, —N(R⁷)C(O)OR⁷, —C(O)OR⁷, —OC(O)R⁷, and —S(O)R⁷;
R³ and R⁴ are each independently selected from:
—OR⁷, —SR⁷, —N(R⁷)₂, —C(O)R⁷, —C(O)N(R⁷)₂, —N(R⁷)C(O)R⁷, —N(R⁷)C(O)N(R⁷)₂, —OC(O)N(R⁷)₂, —N(R⁷)C(O)OR⁷, —C(O)OR⁷, —OC(O)R⁷, and —S(O)R⁷;
each R⁵ is independently selected from:
—OC(O)R⁷, —OC(O)N(R⁷)₂, —N(R⁷)C(O)R⁷, —N(R⁷)C(O)N(R⁷)₂, —N(R⁷)C(O)OR⁷, —C(O)R⁷, —C(O)OR⁷, and —C(O)N(R⁷)₂;
each R⁶ is independently selected from:
hydrogen;
halogen, —CN, —NO₂, —OR⁷, —SR⁷, —N(R⁷)₂, —C(O)R⁷, —C(O)N(R⁷)₂, —N(R⁷)C(O)R⁷, —N(R⁷)C(O)N(R⁷)₂, —OC(O)N(R⁷)₂, —N(R⁷)C(O)OR⁷, —C(O)OR⁷, —OC(O)R⁷, and —S(O)R⁷; and
C₁₋₆ alkyl optionally substituted with one or more substituents independently selected from halogen, —CN, —NO₂, —OR⁷, —SR⁷, —N(R⁷)₂, —C(O)R⁷, —C(O)N(R⁷)₂, —N(R⁷)C(O)R⁷, —N(R⁷)C(O)N(R⁷)₂, —OC(O)N(R⁷)₂, —N(R⁷)C(O)OR⁷, —C(O)OR⁷, —OC(O)R⁷, and —S(O)R⁷;
each R⁷ is independently selected from:
hydrogen;
C₁₋₆ alkyl, C₂₋₆ alkenyl, and C₂₋₆ alkynyl, each of which is optionally substituted with one or more substituents independently selected from halogen, —CN, —OH, —SH, —NO₂, —NH₂, ═O, ═S, —O—C₁₋₆ alkyl, —S—C₁₋₆ alkyl, —N(C₁₋₆ alkyl)₂, —NH(C₁₋₆ alkyl), C₃₋₁₀ carbocycle, and 3- to 10-membered heterocycle; and
C₃₋₁₀ carbocycle, and 3- to 10-membered heterocycle, each of which is optionally substituted with one or more substituents independently selected from halogen, —CN, —OH, —SH, —NO₂, —NH₂, ═O, ═S, —O—C₁₋₆ alkyl, —S—C₁₋₆ alkyl, —N(C₁₋₆ alkyl)₂, —NH(C₁₋₆ alkyl), C₁₋₆ alkyl, C₂₋₆ alkenyl, C₂₋₆ alkynyl, C₃₋₁₀ carbocycle, 3- to 10-membered heterocycle, and C₁₋₆ haloalkyl.

49. A composition comprising an oligonucleotide that inhibits the expression of SOS2 wherein the oligonucleotide comprises an siRNA comprising a sense strand and an antisense strand, wherein the oligonucleotide comprises a 5′ hydrophobic moiety comprising any one of the following structures: [chemical structure]
wherein the dotted line indicates a covalent connection to the end of the 5′ end of the sense strand, n is 1-3, and R is an alkyl group containing 4-18 carbons.

The application's sequence listing, which the Patent Office published only in electronic form, follows.

SEQUENCE LISTING (11413 sequences)

SEQ ID NO: 1 - RNA, 19 nt, synthetic construct
  source 1..19: mol_type = other RNA
agaagcgggccagcgccgc

SEQ ID NO: 2 - RNA, 19 nt, synthetic construct
  source 1..19: mol_type = other RNA
gaagcgggccagcgccgcc

SEQ ID NO: 3 - RNA, 19 nt, synthetic construct
  source 1..19: mol_type = other RNA
aagcgggccagcgccgccg

SEQ ID NO: 4 - RNA, 19 nt, synthetic construct
  source 1..19: mol_type = other RNA
agcgggccagcgccgccgg

SEQ ID NO: 5 - RNA, 19 nt, synthetic construct
  source 1..19: mol_type = other RNA
gcgggccagcgccgccggg

SEQ ID NO: 6 - RNA, 19 nt, synthetic construct
  source 1..19: mol_type = other RNA
cgggccagcgccgccggga

SEQ ID NO: 7 - RNA, 19 nt, synthetic construct
  source 1..19: mol_type = other RNA
gggccagcgccgccgggaa

SEQ ID NO: 8 - RNA, 19 nt, synthetic construct
  source 1..19: mol_type = other RNA
ggccagcgccgccgggaaa

SEQ ID NO: 9 - RNA, 19 nt, synthetic construct
  source 1..19: mol_type = other RNA
gccagcgccgccgggaaag

SEQ ID NO: 10 - RNA, 19 nt, synthetic construct
  source 1..19: mol_type = other RNA
ccagcgccgccgggaaagg

SEQ ID NO: 11 - RNA, 19 nt, synthetic construct
  source 1..19: mol_type = other RNA
cagcgccgccgggaaagga

SEQ ID NO: 12 - RNA, 19 nt, synthetic construct
  source 1..19: mol_type = other RNA
agcgccgccgggaaaggag

SEQ ID NO: 13 - RNA, 19 nt, synthetic construct
  source 1..19: mol_type = other RNA
gcgccgccgggaaaggagg

SEQ ID NO: 14 - RNA, 19 nt, synthetic construct
  source 1..19: mol_type = other RNA
cgccgccgggaaaggaggt

SEQ ID NO: 15 - RNA, 19 nt, synthetic construct
  source 1..19: mol_type = other RNA
gccgccgggaaaggaggtc

SEQ ID NO: 16 - RNA, 19 nt, synthetic construct
  source 1..19: mol_type = other RNA
ccgccgggaaaggaggtcg

SEQ ID NO: 17 - RNA, 19 nt, synthetic construct
  source 1..19: mol_type = other RNA
cgccgggaaaggaggtcgc

SEQ ID NO: 18 - RNA, 19 nt, synthetic construct
  source 1..19: mol_type = other RNA
gccgggaaaggaggtcgcc

SEQ ID NO: 19 - RNA, 19 nt, synthetic construct
  source 1..19: mol_type = other RNA
ccgggaaaggaggtcgccg

SEQ ID NO: 20 - RNA, 19 nt, synthetic construct
  source 1..19: mol_type = other RNA
cgggaaaggaggtcgccgc

SEQ ID NO: 21 - RNA, 19 nt, synthetic construct
  source 1..19: mol_type = other RNA
gggaaaggaggtcgccgcc

SEQ ID NO: 22 - RNA, 19 nt, synthetic construct
  source 1..19: mol_type = other RNA
ggaaaggaggtcgccgccc

SEQ ID NO: 23 - RNA, 19 nt, synthetic construct
  source 1..19: mol_type = other RNA
gaaaggaggtcgccgcccg

SEQ ID NO: 24 - RNA, 19 nt, synthetic construct
  source 1..19: mol_type = other RNA
aaaggaggtcgccgcccgg

SEQ ID NO: 25 - RNA, 19 nt, synthetic construct
  source 1..19: mol_type = other RNA
aaggaggtcgccgcccggg

SEQ ID NO: 26 - RNA, 19 nt, synthetic construct
  source 1..19: mol_type = other RNA
aggaggtcgccgcccgggg

SEQ ID NO: 27 - RNA, 19 nt, synthetic construct
  source 1..19: mol_type = other RNA
ggaggtcgccgcccggggt

SEQ ID NO: 28 - RNA, 19 nt, synthetic construct
  source 1..19: mol_type = other RNA
gaggtcgccgcccggggtc

SEQ ID NO: 29 - RNA, 19 nt, synthetic construct
  source 1..19: mol_type = other RNA
aggtcgccgcccggggtcg

SEQ ID NO: 30 - RNA, 19 nt, synthetic construct
  source 1..19: mol_type = other RNA
ggtcgccgcccggggtcgc

SEQ ID NO: 31 - RNA, 19 nt, synthetic construct
  source 1..19: mol_type = other RNA
gtcgccgcccggggtcgcc

SEQ ID NO: 32 - RNA, 19 nt, synthetic construct
  source 1..19: mol_type = other RNA
tcgccgcccggggtcgccc

SEQ ID NO: 33 - RNA, 19 nt, synthetic construct
  source 1..19: mol_type = other RNA
cgccgcccggggtcgcccg

SEQ ID NO: 34 - RNA, 19 nt, synthetic construct
  source 1..19: mol_type = other RNA
gccgcccggggtcgcccgg

SEQ ID NO: 35 - RNA, 19 nt, synthetic construct
  source 1..19: mol_type = other RNA
ccgcccggggtcgcccggg

SEQ ID NO: 36 - RNA, 19 nt, synthetic construct
  source 1..19: mol_type = other RNA
cgcccggggtcgcccgggc

SEQ ID NO: 37 - RNA, 19 nt, synthetic construct
  source 1..19: mol_type = other RNA
gcccggggtcgcccgggct

SEQ ID NO: 38 - RNA, 19 nt, synthetic construct
  source 1..19: mol_type = other RNA
cccggggtcgcccgggctt

SEQ ID NO: 39 - RNA, 19 nt, synthetic construct
  source 1..19: mol_type = other RNA
ccggggtcgcccgggcttg

SEQ ID NO: 40 - RNA, 19 nt, synthetic construct
  source 1..19: mol_type = other RNA
cggggtcgcccgggcttgc

SEQ ID NO: 41 - RNA, 19 nt, synthetic construct
  source 1..19: mol_type = other RNA
ggggtcgcccgggcttgcg

SEQ ID NO: 42 - RNA, 19 nt, synthetic construct
  source 1..19: mol_type = other RNA
gggtcgcccgggcttgcgg

SEQ ID NO: 43 - RNA, 19 nt, synthetic construct
  source 1..19: mol_type = other RNA
ggtcgcccgggcttgcggg

SEQ ID NO: 44 - RNA, 19 nt, synthetic construct
  source 1..19: mol_type = other RNA
gtcgcccgggcttgcgggt

SEQ ID NO: 45 - RNA, 19 nt, synthetic construct
  source 1..19: mol_type = other RNA
tcgcccgggcttgcgggtc

SEQ ID NO: 46 - RNA, 19 nt, synthetic construct
  source 1..19: mol_type = other RNA
cgcccgggcttgcgggtcg

SEQ ID NO: 47 - RNA, 19 nt, synthetic construct
  source 1..19: mol_type = other RNA
gcccgggcttgcgggtcgc

SEQ ID NO: 48 - RNA, 19 nt, synthetic construct
  source 1..19: mol_type = other RNA
cccgggcttgcgggtcgcc

SEQ ID NO: 49 - RNA, 19 nt, synthetic construct
  source 1..19: mol_type = other RNA
ccgggcttgcgggtcgccg

SEQ ID NO: 50 - RNA, 19 nt, synthetic construct
  source 1..19: mol_type = other RNA
cgggcttgcgggtcgccgc

SEQ ID NO: 51 - RNA, 19 nt, synthetic construct
  source 1..19: mol_type = other RNA
gggcttgcgggtcgccgcg

SEQ ID NO: 52 - RNA, 19 nt, synthetic construct
  source 1..19: mol_type = other RNA
ggcttgcgggtcgccgcgc

SEQ ID NO: 53 - RNA, 19 nt, synthetic construct
  source 1..19: mol_type = other RNA
gcttgcgggtcgccgcgct

SEQ ID NO: 54 - RNA, 19 nt, synthetic construct
  source 1..19: mol_type = other RNA
cttgcgggtcgccgcgctt

SEQ ID NO: 55 - RNA, 19 nt, synthetic construct
  source 1..19: mol_type = other RNA
ttgcgggtcgccgcgcttc

SEQ ID NO: 56 - RNA, 19 nt, synthetic construct
  source 1..19: mol_type = other RNA
tgcgggtcgccgcgcttcc

SEQ ID NO: 57 - RNA, 19 nt, synthetic construct
  source 1..19: mol_type = other RNA
gcgggtcgccgcgcttcct

SEQ ID NO: 58 - RNA, 19 nt, synthetic construct
  source 1..19: mol_type = other RNA
cgggtcgccgcgcttcctc

SEQ ID NO: 59 - RNA, 19 nt, synthetic construct
  source 1..19: mol_type = other RNA
gggtcgccgcgcttcctct

SEQ ID NO: 60 - RNA, 19 nt, synthetic construct
  source 1..19: mol_type = other RNA
ggtcgccgcgcttcctctg

SEQ ID NO: 61 - RNA, 19 nt, synthetic construct
  source 1..19: mol_type = other RNA
gtcgccgcgcttcctctgc

SEQ ID NO: 62 - RNA, 19 nt, synthetic construct
  source 1..19: mol_type = other RNA
tcgccgcgcttcctctgcg

SEQ ID NO: 63 - RNA, 19 nt, synthetic construct
  source 1..19: mol_type = other RNA
cgccgcgcttcctctgcgg

SEQ ID NO: 64 - RNA, 19 nt, synthetic construct
  source 1..19: mol_type = other RNA
gccgcgcttcctctgcggg

SEQ ID NO: 65 - RNA, 19 nt, synthetic construct
  source 1..19: mol_type = other RNA
ccgcgcttcctctgcgggc

SEQ ID NO: 66 - RNA, 19 nt, synthetic construct
  source 1..19: mol_type = other RNA
cgcgcttcctctgcgggcg

SEQ ID NO: 67 - RNA, 19 nt, synthetic construct
  source 1..19: mol_type = other RNA
gcgcttcctctgcgggcgc

SEQ ID NO: 68 - RNA, 19 nt, synthetic construct
  source 1..19: mol_type = other RNA
cgcttcctctgcgggcgct

SEQ ID NO: 69 - RNA, 19 nt, synthetic construct
  source 1..19: mol_type = other RNA
gcttcctctgcgggcgctg

SEQ ID NO: 70 - RNA, 19 nt, synthetic construct
  source 1..19: mol_type = other RNA
cttcctctgcgggcgctgc

SEQ ID NO: 71 - RNA, 19 nt, synthetic construct
  source 1..19: mol_type = other RNA
ttcctctgcgggcgctgcg

SEQ ID NO: 72 - RNA, 19 nt, synthetic construct
  source 1..19: mol_type = other RNA
tcctctgcgggcgctgcgg

SEQ ID NO: 73 - RNA, 19 nt, synthetic construct
  source 1..19: mol_type = other RNA
cctctgcgggcgctgcggg

SEQ ID NO: 74 - RNA, 19 nt, synthetic construct
  source 1..19: mol_type = other RNA
ctctgcgggcgctgcggga

SEQ ID NO: 75 - RNA, 19 nt, synthetic construct
  source 1..19: mol_type = other RNA
tctgcgggcgctgcgggag

SEQ ID NO: 76 - RNA, 19 nt, synthetic construct
  source 1..19: mol_type = other RNA
ctgcgggcgctgcgggagg

SEQ ID NO: 77 - RNA, 19 nt, synthetic construct
  source 1..19: mol_type = other RNA
tgcgggcgctgcgggaggc

SEQ ID NO: 78 - RNA, 19 nt, synthetic construct
  source 1..19: mol_type = other RNA
gcgggcgctgcgggaggcg

SEQ ID NO: 79 - RNA, 19 nt, synthetic construct
  source 1..19: mol_type = other RNA
cgggcgctgcgggaggcga

SEQ ID NO: 80 - RNA, 19 nt, synthetic construct
  source 1..19: mol_type = other RNA
gggcgctgcgggaggcgag

SEQ ID NO: 81 - RNA, 19 nt, synthetic construct
  source 1..19: mol_type = other RNA
ggcgctgcgggaggcgagg

SEQ ID NO: 82 - RNA, 19 nt, synthetic construct
  source 1..19: mol_type = other RNA
gcgctgcgggaggcgaggg

SEQ ID NO: 83 - RNA, 19 nt, synthetic construct
  source 1..19: mol_type = other RNA
cgctgcgggaggcgagggc

SEQ ID NO: 84 - RNA, 19 nt, synthetic construct
  source 1..19: mol_type = other RNA
gctgcgggaggcgagggcc

SEQ ID NO: 85 - RNA, 19 nt, synthetic construct
  source 1..19: mol_type = other RNA
ctgcgggaggcgagggccg

SEQ ID NO: 86 - RNA, 19 nt, synthetic construct
  source 1..19: mol_type = other RNA
tgcgggaggcgagggccgc

SEQ ID NO: 87 - RNA, 19 nt, synthetic construct
  source 1..19: mol_type = other RNA
gcgggaggcgagggccgcc

SEQ ID NO: 88 - RNA, 19 nt, synthetic construct
  source 1..19: mol_type = other RNA
cgggaggcgagggccgcct

SEQ ID NO: 89 - RNA, 19 nt, synthetic construct
  source 1..19: mol_type = other RNA
gggaggcgagggccgcctc

SEQ ID NO: 90 - RNA, 19 nt, synthetic construct
  source 1..19: mol_type = other RNA
ggaggcgagggccgcctcg

SEQ ID NO: 91 - RNA, 19 nt, synthetic construct
  source 1..19: mol_type = other RNA
gaggcgagggccgcctcgg

SEQ ID NO: 92 - RNA, 19 nt, synthetic construct
  source 1..19: mol_type = other RNA
aggcgagggccgcctcggc

SEQ ID NO: 93 - RNA, 19 nt, synthetic construct
  source 1..19: mol_type = other RNA
ggcgagggccgcctcggcg

SEQ ID NO: 94 - RNA, 19 nt, synthetic construct
  source 1..19: mol_type = other RNA
gcgagggccgcctcggcgg

SEQ ID NO: 95 - RNA, 19 nt, synthetic construct
  source 1..19: mol_type = other RNA
cgagggccgcctcggcgga

SEQ ID NO: 96 - RNA, 19 nt, synthetic construct
  source 1..19: mol_type = other RNA
gagggccgcctcggcggag

SEQ ID NO: 97 - RNA, 19 nt, synthetic construct
  source 1..19: mol_type = other RNA
agggccgcctcggcggagg

SEQ ID NO: 98 - RNA, 19 nt, synthetic construct
  source 1..19: mol_type = other RNA
gggccgcctcggcggagga

SEQ ID NO: 99 - RNA, 19 nt, synthetic construct
  source 1..19: mol_type = other RNA
ggccgcctcggcggaggaa

SEQ ID NO: 100 - RNA, 19 nt, synthetic construct
  source 1..19: mol_type = other RNA
gccgcctcggcggaggaag

SEQ ID NO: 101 - RNA, 19 nt, synthetic construct
  source 1..19: mol_type = other RNA
ccgcctcggcggaggaagc

SEQ ID NO: 102 - RNA, 19 nt, synthetic construct
  source 1..19: mol_type = other RNA
cgcctcggcggaggaagcc

SEQ ID NO: 103 - RNA, 19 nt, synthetic construct
  source 1..19: mol_type = other RNA
gcctcggcggaggaagccg

SEQ ID NO: 104 - RNA, 19 nt, synthetic construct
  source 1..19: mol_type = other RNA
cctcggcggaggaagccga

SEQ ID NO: 105 - RNA, 19 nt, synthetic construct
  source 1..19: mol_type = other RNA
ctcggcggaggaagccgac

SEQ ID NO: 106 - RNA, 19 nt, synthetic construct
  source 1..19: mol_type = other RNA
tcggcggaggaagccgacc

SEQ ID NO: 107 - RNA, 19 nt, synthetic construct
  source 1..19: mol_type = other RNA
cggcggaggaagccgaccc

SEQ ID NO: 108 - RNA, 19 nt, synthetic construct
  source 1..19: mol_type = other RNA
ggcggaggaagccgacccc

SEQ ID NO: 109 - RNA, 19 nt, synthetic construct
  source 1..19: mol_type = other RNA
gcggaggaagccgaccccg

SEQ ID NO: 110 - RNA, 19 nt, synthetic construct
  source 1..19: mol_type = other RNA
cggaggaagccgaccccgg

SEQ ID NO: 111 - RNA, 19 nt, synthetic construct
  source 1..19: mol_type = other RNA
ggaggaagccgaccccggg

SEQ ID NO: 112 - RNA, 19 nt, synthetic construct
  source 1..19: mol_type = other RNA
gaggaagccgaccccgggg

SEQ ID NO: 113 - RNA, 19 nt, synthetic construct
  source 1..19: mol_type = other RNA
aggaagccgaccccggggt

SEQ ID NO: 114 - RNA, 19 nt, synthetic construct
  source 1..19: mol_type = other RNA
ggaagccgaccccggggtc

SEQ ID NO: 115 - RNA, 19 nt, synthetic construct
  source 1..19: mol_type = other RNA
gaagccgaccccggggtct

SEQ ID NO: 116 - RNA, 19 nt, synthetic construct
  source 1..19: mol_type = other RNA
aagccgaccccggggtctc

SEQ ID NO: 117 - RNA, 19 nt, synthetic construct
  source 1..19: mol_type = other RNA
agccgaccccggggtctcc

SEQ ID NO: 118 - RNA, 19 nt, synthetic construct
  source 1..19: mol_type = other RNA
gccgaccccggggtctccg

SEQ ID NO: 119 - RNA, 19 nt, synthetic construct
  source 1..19: mol_type = other RNA
ccgaccccggggtctccgc

SEQ ID NO: 120 - RNA, 19 nt, synthetic construct
  source 1..19: mol_type = other RNA
cgaccccggggtctccgcc

SEQ ID NO: 121 - RNA, 19 nt, synthetic construct
  source 1..19: mol_type = other RNA
gaccccggggtctccgcca

SEQ ID NO: 122 - RNA, 19 nt, synthetic construct
  source 1..19: mol_type = other RNA
accccggggtctccgccag

SEQ ID NO: 123 - RNA, 19 nt, synthetic construct
  source 1..19: mol_type = other RNA
ccccggggtctccgccagc

SEQ ID NO: 124 - RNA, 19 nt, synthetic construct
  source 1..19: mol_type = other RNA
cccggggtctccgccagcc

SEQ ID NO: 125 - RNA, 19 nt, synthetic construct
  source 1..19: mol_type = other RNA
ccggggtctccgccagccc

SEQ ID NO: 126 - RNA, 19 nt, synthetic construct
  source 1..19: mol_type = other RNA
cggggtctccgccagcccg

SEQ ID NO: 127 - RNA, 19 nt, synthetic construct
  source 1..19: mol_type = other RNA
ggggtctccgccagcccgc

SEQ ID NO: 128 - RNA, 19 nt, synthetic construct
  source 1..19: mol_type = other RNA
gggtctccgccagcccgcc

SEQ ID NO: 129 - RNA, 19 nt, synthetic construct
  source 1..19: mol_type = other RNA
ggtctccgccagcccgccg

SEQ ID NO: 130 - RNA, 19 nt, synthetic construct
  source 1..19: mol_type = other RNA
gtctccgccagcccgccgg

SEQ ID NO: 131 - RNA, 19 nt, synthetic construct
  source 1..19: mol_type = other RNA
tctccgccagcccgccggc

SEQ ID NO: 132 - RNA, 19 nt, synthetic construct
  source 1..19: mol_type = other RNA
ctccgccagcccgccggcg

SEQ ID NO: 133 - RNA, 19 nt, synthetic construct
  source 1..19: mol_type = other RNA
tccgccagcccgccggcgc

SEQ ID NO: 134 - RNA, 19 nt, synthetic construct
  source 1..19: mol_type = other RNA
ccgccagcccgccggcgcc

SEQ ID NO: 135 - RNA, 19 nt, synthetic construct
  source 1..19: mol_type = other RNA
cgccagcccgccggcgccg

SEQ ID NO: 136 - RNA, 19 nt, synthetic construct
  source 1..19: mol_type = other RNA
gccagcccgccggcgccgc

SEQ ID NO: 137 - RNA, 19 nt, synthetic construct
  source 1..19: mol_type = other RNA
ccagcccgccggcgccgcc

SEQ ID NO: 138 - RNA, 19 nt, synthetic construct
  source 1..19: mol_type = other RNA
cagcccgccggcgccgcct

SEQ ID NO: 139 - RNA, 19 nt, synthetic construct
  source 1..19: mol_type = other RNA
agcccgccggcgccgcctc

SEQ ID NO: 140 - RNA, 19 nt, synthetic construct
  source 1..19: mol_type = other RNA
gcccgccggcgccgcctcc

SEQ ID NO: 141 - RNA, 19 nt, synthetic construct
  source 1..19: mol_type = other RNA
cccgccggcgccgcctccg

SEQ ID NO: 142 - RNA, 19 nt, synthetic construct
  source 1..19: mol_type = other RNA
ccgccggcgccgcctccga

SEQ ID NO: 143 - RNA, 19 nt, synthetic construct
  source 1..19: mol_type = other RNA
cgccggcgccgcctccgag

SEQ ID NO: 144 - RNA, 19 nt, synthetic construct
  source 1..19: mol_type = other RNA
gccggcgccgcctccgagc

SEQ ID NO: 145 - RNA, 19 nt, synthetic construct
  source 1..19: mol_type = other RNA
ccggcgccgcctccgagcc

SEQ ID NO: 146 - RNA, 19 nt, synthetic construct
  source 1..19: mol_type = other RNA
cggcgccgcctccgagccg

SEQ ID NO: 147 - RNA, 19 nt, synthetic construct
  source 1..19: mol_type = other RNA
ggcgccgcctccgagccgc

SEQ ID NO: 148 - RNA, 19 nt, synthetic construct
  source 1..19: mol_type = other RNA
gcgccgcctccgagccgcc

SEQ ID NO: 149 - RNA, 19 nt, synthetic construct
  source 1..19: mol_type = other RNA
cgccgcctccgagccgcct

SEQ ID NO: 150 - RNA, 19 nt, synthetic construct
  source 1..19: mol_type = other RNA
gccgcctccgagccgcctc

SEQ ID NO: 151 - RNA, 19 nt, synthetic construct
  source 1..19: mol_type = other RNA
ccgcctccgagccgcctcg

SEQ ID NO: 152 - RNA, 19 nt, synthetic construct
  source 1..19: mol_type = other RNA
cgcctccgagccgcctcgg

SEQ ID NO: 153 - RNA, 19 nt, synthetic construct
  source 1..19: mol_type = other RNA
gcctccgagccgcctcggc

SEQ ID NO: 154 - RNA, 19 nt, synthetic construct
  source 1..19: mol_type = other RNA
cctccgagccgcctcggcc

SEQ ID NO: 155 - RNA, 19 nt, synthetic construct
  source 1..19: mol_type = other RNA
ctccgagccgcctcggccg

SEQ ID NO: 156 - RNA, 19 nt, synthetic construct
  source 1..19: mol_type = other RNA
tccgagccgcctcggccgt

SEQ ID NO: 157 - RNA, 19 nt, synthetic construct
  source 1..19: mol_type = other RNA
ccgagccgcctcggccgta

SEQ ID NO: 158 - RNA, 19 nt, synthetic construct
  source 1..19: mol_type = other RNA
cgagccgcctcggccgtag

SEQ ID NO: 159 - RNA, 19 nt, synthetic construct
  source 1..19: mol_type = other RNA
gagccgcctcggccgtagc

SEQ ID NO: 160 - RNA, 19 nt, synthetic construct
  source 1..19: mol_type = other RNA
agccgcctcggccgtagcc

SEQ ID NO: 161 - RNA, 19 nt, synthetic construct
  source 1..19: mol_type = other RNA
gccgcctcggccgtagcct

SEQ ID NO: 162 - RNA, 19 nt, synthetic construct
  source 1..19: mol_type = other RNA
ccgcctcggccgtagcctc

SEQ ID NO: 163 - RNA, 19 nt, synthetic construct
  source 1..19: mol_type = other RNA
cgcctcggccgtagcctcg

SEQ ID NO: 164 - RNA, 19 nt, synthetic construct
  source 1..19: mol_type = other RNA
gcctcggccgtagcctcgg

SEQ ID NO: 165 - RNA, 19 nt, synthetic construct
  source 1..19: mol_type = other RNA
cctcggccgtagcctcggc

SEQ ID NO: 166 - RNA, 19 nt, synthetic construct
  source 1..19: mol_type = other RNA
ctcggccgtagcctcggcc

SEQ ID NO: 167 - RNA, 19 nt, synthetic construct
  source 1..19: mol_type = other RNA
tcggccgtagcctcggccc

SEQ ID NO: 168 - RNA, 19 nt, synthetic construct
  source 1..19: mol_type = other RNA
cggccgtagcctcggcccg

SEQ ID NO: 169 - RNA, 19 nt, synthetic construct
  source 1..19: mol_type = other RNA
ggccgtagcctcggcccgg

SEQ ID NO: 170 - RNA, 19 nt, synthetic construct
  source 1..19: mol_type = other RNA
gccgtagcctcggcccggg

SEQ ID NO: 171 - RNA, 19 nt, synthetic construct
  source 1..19: mol_type = other RNA
ccgtagcctcggcccgggc

SEQ ID NO: 172 - RNA, 19 nt, synthetic construct
  source 1..19: mol_type = other RNA
cgtagcctcggcccgggcg

SEQ ID NO: 173 - RNA, 19 nt, synthetic construct
  source 1..19: mol_type = other RNA
gtagcctcggcccgggcgg

SEQ ID NO: 174 - RNA, 19 nt, synthetic construct
  source 1..19: mol_type = other RNA
tagcctcggcccgggcggg

SEQ ID NO: 175 - RNA, 19 nt, synthetic construct
  source 1..19: mol_type = other RNA
agcctcggcccgggcggga

SEQ ID NO: 176 - RNA, 19 nt, synthetic construct
  source 1..19: mol_type = other RNA
gcctcggcccgggcgggag

SEQ ID NO: 177 - RNA, 19 nt, synthetic construct
  source 1..19: mol_type = other RNA
cctcggcccgggcgggagg

SEQ ID NO: 178 - RNA, 19 nt, synthetic construct
  source 1..19: mol_type = other RNA
ctcggcccgggcgggaggc

SEQ ID NO: 179 - RNA, 19 nt, synthetic construct
  source 1..19: mol_type = other RNA
tcggcccgggcgggaggcg

SEQ ID NO: 180 - RNA, 19 nt, synthetic construct
  source 1..19: mol_type = other RNA
cggcccgggcgggaggcgg

SEQ ID NO: 181 - RNA, 19 nt, synthetic construct
  source 1..19: mol_type = other RNA
ggcccgggcgggaggcggc

SEQ ID NO: 182 - RNA, 19 nt, synthetic construct
  source 1..19: mol_type = other RNA
gcccgggcgggaggcggcg

SEQ ID NO: 183 - RNA, 19 nt, synthetic construct
  source 1..19: mol_type = other RNA
cccgggcgggaggcggcgg

SEQ ID NO: 184 - RNA, 19 nt, synthetic construct
  source 1..19: mol_type = other RNA
ccgggcgggaggcggcggc

SEQ ID NO: 185 - RNA, 19 nt, synthetic construct
  source 1..19: mol_type = other RNA
cgggcgggaggcggcggcc

SEQ ID NO: 186 - RNA, 19 nt, synthetic construct
  source 1..19: mol_type = other RNA
gggcgggaggcggcggccg

SEQ ID NO: 187 - RNA, 19 nt, synthetic construct
  source 1..19: mol_type = other RNA
ggcgggaggcggcggccgc

SEQ ID NO: 188 - RNA, 19 nt, synthetic construct
  source 1..19: mol_type = other RNA
gcgggaggcggcggccgcc

SEQ ID NO: 189 - RNA, 19 nt, synthetic construct
  source 1..19: mol_type = other RNA
cgggaggcggcggccgccg

SEQ ID NO: 190 - RNA, 19 nt, synthetic construct
  source 1..19: mol_type = other RNA
gggaggcggcggccgccgg

SEQ ID NO: 191 - RNA, 19 nt, synthetic construct
  source 1..19: mol_type = other RNA
ggaggcggcggccgccggc

SEQ ID NO: 192 - RNA, 19 nt, synthetic construct
  source 1..19: mol_type = other RNA
gaggcggcggccgccggcg

SEQ ID NO: 193 - RNA, 19 nt, synthetic construct
  source 1..19: mol_type = other RNA
aggcggcggccgccggcga

SEQ ID NO: 194 - RNA, 19 nt, synthetic construct
  source 1..19: mol_type = other RNA
ggcggcggccgccggcgag

SEQ ID NO: 195 - RNA, 19 nt, synthetic construct
  source 1..19: mol_type = other RNA
gcggcggccgccggcgagg

SEQ ID NO: 196 - RNA, 19 nt, synthetic construct
  source 1..19: mol_type = other RNA
cggcggccgccggcgaggc

SEQ ID NO: 197 - RNA, 19 nt, synthetic construct
  source 1..19: mol_type = other RNA
ggcggccgccggcgaggcg

SEQ ID NO: 198 - RNA, 19 nt, synthetic construct
  source 1..19: mol_type = other RNA
gcggccgccggcgaggcga

SEQ ID NO: 199 - RNA, 19 nt, synthetic construct
  source 1..19: mol_type = other RNA
cggccgccggcgaggcgag

SEQ ID NO: 200 - RNA, 19 nt, synthetic construct
  source 1..19: mol_type = other RNA
ggccgccggcgaggcgagg

SEQ ID NO: 201 - RNA, 19 nt, synthetic construct
  source 1..19: mol_type = other RNA
gccgccggcgaggcgaggc

SEQ ID NO: 202 - RNA, 19 nt, synthetic construct
  source 1..19: mol_type = other RNA
ccgccggcgaggcgaggcg

SEQ ID NO: 203 - RNA, 19 nt, synthetic construct
  source 1..19: mol_type = other RNA
cgccggcgaggcgaggcgg

SEQ ID NO: 204 - RNA, 19 nt, synthetic construct
  source 1..19: mol_type = other RNA
gccggcgaggcgaggcggc

SEQ ID NO: 205 - RNA, 19 nt, synthetic construct
  source 1..19: mol_type = other RNA
ccggcgaggcgaggcggcc

SEQ ID NO: 206 - RNA, 19 nt, synthetic construct
  source 1..19: mol_type = other RNA
cggcgaggcgaggcggccc

SEQ ID NO: 207 - RNA, 19 nt, synthetic construct
  source 1..19: mol_type = other RNA
ggcgaggcgaggcggcccg

SEQ ID NO: 208 - RNA, 19 nt, synthetic construct
  source 1..19: mol_type = other RNA
gcgaggcgaggcggcccgc

SEQ ID NO: 209 - RNA, 19 nt, synthetic construct
  source 1..19: mol_type = other RNA
cgaggcgaggcggcccgcg

SEQ ID NO: 210 - RNA, 19 nt, synthetic construct
  source 1..19: mol_type = other RNA
gaggcgaggcggcccgcgc

SEQ ID NO: 211 - RNA, 19 nt, synthetic construct
  source 1..19: mol_type = other RNA
aggcgaggcggcccgcgcc

SEQ ID NO: 212 - RNA, 19 nt, synthetic construct
  source 1..19: mol_type = other RNA
ggcgaggcggcccgcgccc

SEQ ID NO: 213 - RNA, 19 nt, synthetic construct
  source 1..19: mol_type = other RNA
gcgaggcggcccgcgccct

SEQ ID NO: 214 - RNA, 19 nt, synthetic construct
  source 1..19: mol_type = other RNA
cgaggcggcccgcgccctg

SEQ ID NO: 215 - RNA, 19 nt, synthetic construct
  source 1..19: mol_type = other RNA
gaggcggcccgcgccctgc

SEQ ID NO: 216 - RNA, 19 nt, synthetic construct
  source 1..19: mol_type = other RNA
aggcggcccgcgccctgcc

SEQ ID NO: 217 - RNA, 19 nt, synthetic construct
  source 1..19: mol_type = other RNA
ggcggcccgcgccctgcct

SEQ ID NO: 218 - RNA, 19 nt, synthetic construct
  source 1..19: mol_type = other RNA
gcggcccgcgccctgcctg

SEQ ID NO: 219 - RNA, 19 nt, synthetic construct
  source 1..19: mol_type = other RNA
cggcccgcgccctgcctgt

SEQ ID NO: 220 - RNA, 19 nt, synthetic construct
  source 1..19: mol_type = other RNA
ggcccgcgccctgcctgtc

SEQ ID NO: 221 - RNA, 19 nt, synthetic construct
  source 1..19: mol_type = other RNA
gcccgcgccctgcctgtca

SEQ ID NO: 222 - RNA, 19 nt, synthetic construct
  source 1..19: mol_type = other RNA
cccgcgccctgcctgtcag

SEQ ID NO: 223 - RNA, 19 nt, synthetic construct
  source 1..19: mol_type = other RNA
ccgcgccctgcctgtcagg

SEQ ID NO: 224 - RNA, 19 nt, synthetic construct
  source 1..19: mol_type = other RNA
cgcgccctgcctgtcaggc

SEQ ID NO: 225 - RNA, 19 nt, synthetic construct
  source 1..19: mol_type = other RNA
gcgccctgcctgtcaggcc

SEQ ID NO: 226 - RNA, 19 nt, synthetic construct
  source 1..19: mol_type = other RNA
cgccctgcctgtcaggcca

SEQ ID NO: 227 - RNA, 19 nt, synthetic construct
  source 1..19: mol_type = other RNA
gccctgcctgtcaggccac

SEQ ID NO: 228 - RNA, 19 nt, synthetic construct
  source 1..19: mol_type = other RNA
ccctgcctgtcaggccacc

SEQ ID NO: 229 - RNA, 19 nt, synthetic construct
  source 1..19: mol_type = other RNA
cctgcctgtcaggccaccg

SEQ ID NO: 230 - RNA, 19 nt, synthetic construct
  source 1..19: mol_type = other RNA
ctgcctgtcaggccaccgg

SEQ ID NO: 231 - RNA, 19 nt, synthetic construct
  source 1..19: mol_type = other RNA
tgcctgtcaggccaccggc

SEQ ID NO: 232 - RNA, 19 nt, synthetic construct
  source 1..19: mol_type = other RNA
gcctgtcaggccaccggcc

SEQ ID NO: 233 - RNA, 19 nt, synthetic construct
  source 1..19: mol_type = other RNA
cctgtcaggccaccggccc

SEQ ID NO: 234 - RNA, 19 nt, synthetic construct
  source 1..19: mol_type = other RNA
ctgtcaggccaccggcccg

SEQ ID NO: 235 - RNA, 19 nt, synthetic construct
  source 1..19: mol_type = other RNA
tgtcaggccaccggcccgg

SEQ ID NO: 236 - RNA, 19 nt, synthetic construct
  source 1..19: mol_type = other RNA
gtcaggccaccggcccggc

SEQ ID NO: 237 - RNA, 19 nt, synthetic construct
  source 1..19: mol_type = other RNA
tcaggccaccggcccggcc

SEQ ID NO: 238 - RNA, 19 nt, synthetic construct
  source 1..19: mol_type = other RNA
caggccaccggcccggccc

SEQ ID NO: 239 - RNA, 19 nt, synthetic construct
  source 1..19: mol_type = other RNA
aggccaccggcccggcccg

SEQ ID NO: 240 - RNA, 19 nt, synthetic construct
  source 1..19: mol_type = other RNA
ggccaccggcccggcccgc

SEQ ID NO: 241 - RNA, 19 nt, synthetic construct
  source 1..19: mol_type = other RNA
gccaccggcccggcccgcg

SEQ ID NO: 242 - RNA, 19 nt, synthetic construct
  source 1..19: mol_type = other RNA
ccaccggcccggcccgcgg

SEQ ID NO: 243 - RNA, 19 nt, synthetic construct
  source 1..19: mol_type = other RNA
caccggcccggcccgcggg

SEQ ID NO: 244 - RNA, 19 nt, synthetic construct
  source 1..19: mol_type = other RNA
accggcccggcccgcgggc

SEQ ID NO: 245 - RNA, 19 nt, synthetic construct
  source 1..19: mol_type = other RNA
ccggcccggcccgcgggct

SEQ ID NO: 246 - RNA, 19 nt, synthetic construct
  source 1..19: mol_type = other RNA
cggcccggcccgcgggctg

SEQ ID NO: 247 - RNA, 19 nt, synthetic construct
  source 1..19: mol_type = other RNA
ggcccggcccgcgggctgc

SEQ ID NO: 248 - RNA, 19 nt, synthetic construct
  source 1..19: mol_type = other RNA
gcccggcccgcgggctgcc

SEQ ID NO: 249 - RNA, 19 nt, synthetic construct
  source 1..19: mol_type = other RNA
cccggcccgcgggctgccc

SEQ ID NO: 250 - RNA, 19 nt, synthetic construct
  source 1..19: mol_type = other RNA
ccggcccgcgggctgcccc

SEQ ID NO: 251 - RNA, 19 nt, synthetic construct
  source 1..19: mol_type = other RNA
cggcccgcgggctgccccc

SEQ ID NO: 252 - RNA, 19 nt, synthetic construct
  source 1..19: mol_type = other RNA
ggcccgcgggctgcccccg

SEQ ID NO: 253 - RNA, 19 nt, synthetic construct
  source 1..19: mol_type = other RNA
gcccgcgggctgcccccga

SEQ ID NO: 254 - RNA, 19 nt, synthetic construct
  source 1..19: mol_type = other RNA
cccgcgggctgcccccgat

SEQ ID NO: 255 - RNA, 19 nt, synthetic construct
  source 1..19: mol_type = other RNA
ccgcgggctgcccccgatg

SEQ ID NO: 256 - RNA, 19 nt, synthetic construct
  source 1..19: mol_type = other RNA
cgcgggctgcccccgatgc

SEQ ID NO: 257 - RNA, 19 nt, synthetic construct
  source 1..19: mol_type = other RNA
gcgggctgcccccgatgcg

SEQ ID NO: 258 - RNA, 19 nt, synthetic construct
  source 1..19: mol_type = other RNA
cgggctgcccccgatgcgg

SEQ ID NO: 259 - RNA, 19 nt, synthetic construct
  source 1..19: mol_type = other RNA
gggctgcccccgatgcgga

SEQ ID NO: 260 - RNA, 19 nt, synthetic construct
  source 1..19: mol_type = other RNA
ggctgcccccgatgcggag

SEQ ID NO: 261 - RNA, 19 nt, synthetic construct
  source 1..19: mol_type = other RNA
gctgcccccgatgcggagg

SEQ ID NO: 262 - RNA, 19 nt, synthetic construct
  source 1..19: mol_type = other RNA
ctgcccccgatgcggaggc

SEQ ID NO: 263 - RNA, 19 nt, synthetic construct
  source 1..19: mol_type = other RNA
tgcccccgatgcggaggcg

SEQ ID NO: 264 - RNA, 19 nt, synthetic construct
  source 1..19: mol_type = other RNA
gcccccgatgcggaggcgc

SEQ ID NO: 265 - RNA, 19 nt, synthetic construct
  source 1..19: mol_type = other RNA
cccccgatgcggaggcgct

SEQ ID NO: 266 - RNA, 19 nt, synthetic construct
  source 1..19: mol_type = other RNA
ccccgatgcggaggcgctg

SEQ ID NO: 267 - RNA, 19 nt, synthetic construct
  source 1..19: mol_type = other RNA
cccgatgcggaggcgctgt

SEQ ID NO: 268 - RNA, 19 nt, synthetic construct
  source 1..19: mol_type = other RNA
ccgatgcggaggcgctgtc

SEQ ID NO: 269 - RNA, 19 nt, synthetic construct
  source 1..19: mol_type = other RNA
cgatgcggaggcgctgtcg

SEQ ID NO: 270 - RNA, 19 nt, synthetic construct
  source 1..19: mol_type = other RNA
gatgcggaggcgctgtcgc

SEQ ID NO: 271 - RNA, 19 nt, synthetic construct
  source 1..19: mol_type = other RNA
atgcggaggcgctgtcgcc

SEQ ID NO: 272 - RNA, 19 nt, synthetic construct
  source 1..19: mol_type = other RNA
tgcggaggcgctgtcgccg

SEQ ID NO: 273 - RNA, 19 nt, synthetic construct
  source 1..19: mol_type = other RNA
gcggaggcgctgtcgccgg

SEQ ID NO: 274 - RNA, 19 nt, synthetic construct
  source 1..19: mol_type = other RNA
cggaggcgctgtcgccggg

SEQ ID NO: 275 - RNA, 19 nt, synthetic construct
  source 1..19: mol_type = other RNA
ggaggcgctgtcgccgggg

SEQ ID NO: 276 - RNA, 19 nt, synthetic construct
  source 1..19: mol_type = other RNA
gaggcgctgtcgccggggc

SEQ ID NO: 277 - RNA, 19 nt, synthetic construct
  source 1..19: mol_type = other RNA
aggcgctgtcgccggggcc

SEQ ID NO: 278 - RNA, 19 nt, synthetic construct
  source 1..19: mol_type = other RNA
ggcgctgtcgccggggcca

SEQ ID NO: 279 - RNA, 19 nt, synthetic construct
  source 1..19: mol_type = other RNA
gcgctgtcgccggggccat

SEQ ID NO: 280 - RNA, 19 nt, synthetic construct
  source 1..19: mol_type = other RNA
cgctgtcgccggggccatg

SEQ ID NO: 281 - RNA, 19 nt, synthetic construct
  source 1..19: mol_type = other RNA
gctgtcgccggggccatgc

SEQ ID NO: 282 - RNA, 19 nt, synthetic construct
  source 1..19: mol_type = other RNA
ctgtcgccggggccatgca

SEQ ID NO: 283 - RNA, 19 nt, synthetic construct
  source 1..19: mol_type = other RNA
tgtcgccggggccatgcag

SEQ ID NO: 284 - RNA, 19 nt, synthetic construct
  source 1..19: mol_type = other RNA
gtcgccggggccatgcagc

SEQ ID NO: 285 - RNA, 19 nt, synthetic construct
  source 1..19: mol_type = other RNA
tcgccggggccatgcagca

SEQ ID NO: 286 - RNA, 19 nt, synthetic construct
  source 1..19: mol_type = other RNA
cgccggggccatgcagcag

SEQ ID NO: 287 - RNA, 19 nt, synthetic construct
  source 1..19: mol_type = other RNA
gccggggccatgcagcagg

SEQ ID NO: 288 - RNA, 19 nt, synthetic construct
  source 1..19: mol_type = other RNA
ccggggccatgcagcaggc

SEQ ID NO: 289 - RNA, 19 nt, synthetic construct
  source 1..19: mol_type = other RNA
cggggccatgcagcaggcg

SEQ ID NO: 290 - RNA, 19 nt, synthetic construct
  source 1..19: mol_type = other RNA
ggggccatgcagcaggcgc

SEQ ID NO: 291 - RNA, 19 nt, synthetic construct
  source 1..19: mol_type = other RNA
gggccatgcagcaggcgcc

SEQ ID NO: 292 - RNA, 19 nt, synthetic construct
  source 1..19: mol_type = other RNA
ggccatgcagcaggcgccg

SEQ ID NO: 293 - RNA, 19 nt, synthetic construct
  source 1..19: mol_type = other RNA
gccatgcagcaggcgccgc

SEQ ID NO: 294 - RNA, 19 nt, synthetic construct
  source 1..19: mol_type = other RNA
ccatgcagcaggcgccgca

SEQ ID NO: 295 - RNA, 19 nt, synthetic construct
  source 1..19: mol_type = other RNA
catgcagcaggcgccgcag

SEQ ID NO: 296 - RNA, 19 nt, synthetic construct
  source 1..19: mol_type = other RNA
atgcagcaggcgccgcagc

SEQ ID NO: 297 - RNA, 19 nt, synthetic construct
  source 1..19: mol_type = other RNA
tgcagcaggcgccgcagcc

SEQ ID NO: 298 - RNA, 19 nt, synthetic construct
  source 1..19: mol_type = other RNA
gcagcaggcgccgcagcct

SEQ ID NO: 299 - RNA, 19 nt, synthetic construct
  source 1..19: mol_type = other RNA
cagcaggcgccgcagcctt

SEQ ID NO: 300 - RNA, 19 nt, synthetic construct
  source 1..19: mol_type = other RNA
agcaggcgccgcagcctta

SEQ ID NO: 301 - RNA, 19 nt, synthetic construct
  source 1..19: mol_type = other RNA
gcaggcgccgcagccttac

SEQ ID NO: 302 - RNA, 19 nt, synthetic construct
  source 1..19: mol_type = other RNA
caggcgccgcagccttacg

SEQ ID NO: 303 - RNA, 19 nt, synthetic construct
  source 1..19: mol_type = other RNA
aggcgccgcagccttacga

SEQ ID NO: 304 - RNA, 19 nt, synthetic construct
  source 1..19: mol_type = other RNA
ggcgccgcagccttacgag

SEQ ID NO: 305 - RNA, 19 nt, synthetic construct
  source 1..19: mol_type = other RNA
gcgccgcagccttacgagt

SEQ ID NO: 306 - RNA, 19 nt, synthetic construct
  source 1..19: mol_type = other RNA
cgccgcagccttacgagtt

SEQ ID NO: 307 - RNA, 19 nt, synthetic construct
  source 1..19: mol_type = other RNA
gccgcagccttacgagttc

SEQ ID NO: 308 - RNA, 19 nt, synthetic construct
  source 1..19: mol_type = other RNA
ccgcagccttacgagttct

SEQ ID NO: 309 - RNA, 19 nt, synthetic construct
  source 1..19: mol_type = other RNA
cgcagccttacgagttctt

SEQ ID NO: 310 - RNA, 19 nt, synthetic construct
  source 1..19: mol_type = other RNA
gcagccttacgagttcttc

SEQ ID NO: 311 - RNA, 19 nt, synthetic construct
  source 1..19: mol_type = other RNA
cagccttacgagttcttca

SEQ ID NO: 312 - RNA, 19 nt, synthetic construct
  source 1..19: mol_type = other RNA
agccttacgagttcttcag

SEQ ID NO: 313 - RNA, 19 nt, synthetic construct
  source 1..19: mol_type = other RNA
gccttacgagttcttcagc

SEQ ID NO: 314 - RNA, 19 nt, synthetic construct
  source 1..19: mol_type = other RNA
ccttacgagttcttcagcg

SEQ ID NO: 315 - RNA, 19 nt, synthetic construct
  source 1..19: mol_type = other RNA
cttacgagttcttcagcga

SEQ ID NO: 316 - RNA, 19 nt, synthetic construct
  source 1..19: mol_type = other RNA
ttacgagttcttcagcgag

SEQ ID NO: 317 - RNA, 19 nt, synthetic construct
  source 1..19: mol_type = other RNA
tacgagttcttcagcgagg

SEQ ID NO: 318 - RNA, 19 nt, synthetic construct
  source 1..19: mol_type = other RNA
acgagttcttcagcgagga

SEQ ID NO: 319 - RNA, 19 nt, synthetic construct
  source 1..19: mol_type = other RNA
cgagttcttcagcgaggag

SEQ ID NO: 320 - RNA, 19 nt, synthetic construct
  source 1..19: mol_type = other RNA
gagttcttcagcgaggaga

SEQ ID NO: 321 - RNA, 19 nt, synthetic construct
  source 1..19: mol_type = other RNA
agttcttcagcgaggagaa

SEQ ID NO: 322 - RNA, 19 nt, synthetic construct
  source 1..19: mol_type = other RNA
gttcttcagcgaggagaac

SEQ ID NO: 323 - RNA, 19 nt, synthetic construct
  source 1..19: mol_type = other RNA
ttcttcagcgaggagaaca

SEQ ID NO: 324 - RNA, 19 nt, synthetic construct
  source 1..19: mol_type = other RNA
tcttcagcgaggagaacag

SEQ ID NO: 325 - RNA, 19 nt, synthetic construct
  source 1..19: mol_type = other RNA
cttcagcgaggagaacagt

SEQ ID NO: 326 - RNA, 19 nt, synthetic construct
  source 1..19: mol_type = other RNA
ttcagcgaggagaacagtc

SEQ ID NO: 327 - RNA, 19 nt, synthetic construct
  source 1..19: mol_type = other RNA
tcagcgaggagaacagtcc

SEQ ID NO: 328 - RNA, 19 nt, synthetic construct
  source 1..19: mol_type = other RNA
cagcgaggagaacagtccg

SEQ ID NO: 329 - RNA, 19 nt, synthetic construct
  source 1..19: mol_type = other RNA
agcgaggagaacagtccga

SEQ ID NO: 330 - RNA, 19 nt, synthetic construct
  source 1..19: mol_type = other RNA
gcgaggagaacagtccgaa

SEQ ID NO: 331 - RNA, 19 nt, synthetic construct
  source 1..19: mol_type = other RNA
cgaggagaacagtccgaaa

SEQ ID NO: 332 - RNA, 19 nt, synthetic construct
  source 1..19: mol_type = other RNA
gaggagaacagtccgaaat

SEQ ID NO: 333 - RNA, 19 nt, synthetic construct
  source 1..19: mol_type = other RNA
aggagaacagtccgaaatg

SEQ ID NO: 334 - RNA, 19 nt, synthetic construct
  source 1..19: mol_type = other RNA
ggagaacagtccgaaatgg

SEQ ID NO: 335 - RNA, 19 nt, synthetic construct
  source 1..19: mol_type = other RNA
gagaacagtccgaaatggc

SEQ ID NO: 336 - RNA, 19 nt, synthetic construct
  source 1..19: mol_type = other RNA
agaacagtccgaaatggcg

SEQ ID NO: 337 - RNA, 19 nt, synthetic construct
  source 1..19: mol_type = other RNA
gaacagtccgaaatggcgg

SEQ ID NO: 338 - RNA, 19 nt, synthetic construct
  source 1..19: mol_type = other RNA
aacagtccgaaatggcggg

SEQ ID NO: 339 - RNA, 19 nt, synthetic construct
  source 1..19: mol_type = other RNA
acagtccgaaatggcgggg

SEQ ID NO: 340 - RNA, 19 nt, synthetic construct
  source 1..19: mol_type = other RNA
cagtccgaaatggcgggga

SEQ ID NO: 341 - RNA, 19 nt, synthetic construct
  source 1..19: mol_type = other RNA
agtccgaaatggcggggac

SEQ ID NO: 342 - RNA, 19 nt, synthetic construct
  source 1..19: mol_type = other RNA
gtccgaaatggcggggact

SEQ ID NO: 343 - RNA, 19 nt, synthetic construct
  source 1..19: mol_type = other RNA
tccgaaatggcggggactg

SEQ ID NO: 344 - RNA, 19 nt, synthetic construct
  source 1..19: mol_type = other RNA
ccgaaatggcggggactgt

SEQ ID NO: 345 - RNA, 19 nt, synthetic construct
  source 1..19: mol_type = other RNA
cgaaatggcggggactgtt

SEQ ID NO: 346 - RNA, 19 nt, synthetic construct
  source 1..19: mol_type = other RNA
gaaatggcggggactgttg

SEQ ID NO: 347 - RNA, 19 nt, synthetic construct
  source 1..19: mol_type = other RNA
aaatggcggggactgttgg

SEQ ID NO: 348 - RNA, 19 nt, synthetic construct
  source 1..19: mol_type = other RNA
aatggcggggactgttggt

SEQ ID NO: 349 - RNA, 19 nt, synthetic construct
  source 1..19: mol_type = other RNA
atggcggggactgttggtc

SEQ ID NO: 350 - RNA, 19 nt, synthetic construct
  source 1..19: mol_type = other RNA
tggcggggactgttggtct

SEQ ID NO: 351 - RNA, 19 nt, synthetic construct
  source 1..19: mol_type = other RNA
ggcggggactgttggtctc

SEQ ID NO: 352 - RNA, 19 nt, synthetic construct
  source 1..19: mol_type = other RNA
gcggggactgttggtctcg

SEQ ID NO: 353 - RNA, 19 nt, synthetic construct
  source 1..19: mol_type = other RNA
cggggactgttggtctcgg

SEQ ID NO: 354 - RNA, 19 nt, synthetic construct
  source 1..19: mol_type = other RNA
ggggactgttggtctcggc

SEQ ID NO: 355 - RNA, 19 nt, synthetic construct
  source 1..19: mol_type = other RNA
gggactgttggtctcggcc

SEQ ID NO: 356 - RNA, 19 nt, synthetic construct
  source 1..19: mol_type = other RNA
ggactgttggtctcggccc

SEQ ID NO: 357 - RNA, 19 nt, synthetic construct
  source 1..19: mol_type = other RNA
gactgttggtctcggccct

SEQ ID NO: 358 - RNA, 19 nt, synthetic construct
  source 1..19: mol_type = other RNA
actgttggtctcggccctg

SEQ ID NO: 359 - RNA, 19 nt, synthetic construct
  source 1..19: mol_type = other RNA
ctgttggtctcggccctgc

SEQ ID NO: 360 - RNA, 19 nt, synthetic construct
  source 1..19: mol_type = other RNA
tgttggtctcggccctgcg

SEQ ID NO: 361 - RNA, 19 nt, synthetic construct
  source 1..19: mol_type = other RNA
gttggtctcggccctgcgg

SEQ ID NO: 362 - RNA, 19 nt, synthetic construct
  source 1..19: mol_type = other RNA
ttggtctcggccctgcgga

SEQ ID NO: 363 - RNA, 19 nt, synthetic construct
  source 1..19: mol_type = other RNA
tggtctcggccctgcggaa

SEQ ID NO: 364 - RNA, 19 nt, synthetic construct
  source 1..19: mol_type = other RNA
ggtctcggccctgcggaag

SEQ ID NO: 365 - RNA, 19 nt, synthetic construct
  source 1..19: mol_type = other RNA
gtctcggccctgcggaagg

SEQ ID NO: 366 - RNA, 19 nt, synthetic construct
  source 1..19: mol_type = other RNA
tctcggccctgcggaaggt

SEQ ID NO: 367 - RNA, 19 nt, synthetic construct
  source 1..19: mol_type = other RNA
ctcggccctgcggaaggtt

SEQ ID NO: 368 - RNA, 19 nt, synthetic construct
  source 1..19: mol_type = other RNA
tcggccctgcggaaggttc

SEQ ID NO: 369 - RNA, 19 nt, synthetic construct
  source 1..19: mol_type = other RNA
cggccctgcggaaggttca

SEQ ID NO: 370 - RNA, 19 nt, synthetic construct
  source 1..19: mol_type = other RNA
ggccctgcggaaggttcag

SEQ ID NO: 371 - RNA, 19 nt, synthetic construct
  source 1..19: mol_type = other RNA
gccctgcggaaggttcagg

SEQ ID NO: 372 - RNA, 19 nt, synthetic construct
  source 1..19: mol_type = other RNA
ccctgcggaaggttcagga

SEQ ID NO: 373 - RNA, 19 nt, synthetic construct
  source 1..19: mol_type = other RNA
cctgcggaaggttcaggaa

SEQ ID NO: 374 - RNA, 19 nt, synthetic construct
  source 1..19: mol_type = other RNA
ctgcggaaggttcaggaac

SEQ ID NO: 375 - RNA, 19 nt, synthetic construct
  source 1..19: mol_type = other RNA
tgcggaaggttcaggaaca

SEQ ID NO: 376 - RNA, 19 nt, synthetic construct
  source 1..19: mol_type = other RNA
gcggaaggttcaggaacaa

SEQ ID NO: 377 - RNA, 19 nt, synthetic construct
  source 1..19: mol_type = other RNA
cggaaggttcaggaacaag

SEQ ID NO: 378 - RNA, 19 nt, synthetic construct
  source 1..19: mol_type = other RNA
ggaaggttcaggaacaagt

SEQ ID NO: 379 - RNA, 19 nt, synthetic construct
  source 1..19: mol_type = other RNA
gaaggttcaggaacaagtg

SEQ ID NO: 380 - RNA, 19 nt, synthetic construct
  source 1..19: mol_type = other RNA
aaggttcaggaacaagtgc

SEQ ID NO: 381 - RNA, 19 nt, synthetic construct
  source 1..19: mol_type = other RNA
aggttcaggaacaagtgca

SEQ ID NO: 382 - RNA, 19 nt, synthetic construct
  source 1..19: mol_type = other RNA
ggttcaggaacaagtgcat

SEQ ID NO: 383 - RNA, 19 nt, synthetic construct
  source 1..19: mol_type = other RNA
gttcaggaacaagtgcatc

SEQ ID NO: 384 - RNA, 19 nt, synthetic construct
  source 1..19: mol_type = other RNA
ttcaggaacaagtgcatcc

SEQ ID NO: 385 - RNA, 19 nt, synthetic construct
  source 1..19: mol_type = other RNA
tcaggaacaagtgcatccc

SEQ ID NO: 386 - RNA, 19 nt, synthetic construct
  source 1..19: mol_type = other RNA
caggaacaagtgcatccca

SEQ ID NO: 387 - RNA, 19 nt, synthetic construct
  source 1..19: mol_type = other RNA
aggaacaagtgcatcccac

SEQ ID NO: 388 - RNA, 19 nt, synthetic construct
  source 1..19: mol_type = other RNA
ggaacaagtgcatcccact

SEQ ID NO: 389 - RNA, 19 nt, synthetic construct
  source 1..19: mol_type = other RNA
gaacaagtgcatcccactc

SEQ ID NO: 390 - RNA, 19 nt, synthetic construct
  source 1..19: mol_type = other RNA
aacaagtgcatcccactct

SEQ ID NO: 391 - RNA, 19 nt, synthetic construct
  source 1..19: mol_type = other RNA
acaagtgcatcccactctc

SEQ ID NO: 392 - RNA, 19 nt, synthetic construct
  source 1..19: mol_type = other RNA
caagtgcatcccactctct

SEQ ID NO: 393 - RNA, 19 nt, synthetic construct
  source 1..19: mol_type = other RNA
aagtgcatcccactctctc

SEQ ID NO: 394 - RNA, 19 nt, synthetic construct
  source 1..19: mol_type = other RNA
agtgcatcccactctctca

SEQ ID NO: 395 - RNA, 19 nt, synthetic construct
  source 1..19: mol_type = other RNA
gtgcatcccactctctcag

SEQ ID NO: 396 - RNA, 19 nt, synthetic construct
  source 1..19: mol_type = other RNA
tgcatcccactctctcagc

SEQ ID NO: 397 - RNA, 19 nt, synthetic construct
  source 1..19: mol_type = other RNA
gcatcccactctctcagct

SEQ ID NO: 398 - RNA, 19 nt, synthetic construct
  source 1..19: mol_type = other RNA
catcccactctctcagcta

SEQ ID NO: 399 - RNA, 19 nt, synthetic construct
  source 1..19: mol_type = other RNA
atcccactctctcagctaa

SEQ ID NO: 400 - RNA, 19 nt, synthetic construct
  source 1..19: mol_type = other RNA
tcccactctctcagctaat

SEQ ID NO: 401 - RNA, 19 nt, synthetic construct
  source 1..19: mol_type = other RNA
cccactctctcagctaatg

SEQ ID NO: 402 - RNA, 19 nt, synthetic construct
  source 1..19: mol_type = other RNA
ccactctctcagctaatga

SEQ ID NO: 403 - RNA, 19 nt, synthetic construct
  source 1..19: mol_type = other RNA
cactctctcagctaatgaa

SEQ ID NO: 404 - RNA, 19 nt, synthetic construct
  source 1..19: mol_type = other RNA
actctctcagctaatgaag

SEQ ID NO: 405 - RNA, 19 nt, synthetic construct
  source 1..19: mol_type = other RNA
ctctctcagctaatgaaga

SEQ ID NO: 406 - RNA, 19 nt, synthetic construct
  source 1..19: mol_type = other RNA
tctctcagctaatgaagag

SEQ ID NO: 407 - RNA, 19 nt, synthetic construct
  source 1..19: mol_type = other RNA
ctctcagctaatgaagagt

SEQ ID NO: 408 - RNA, 19 nt, synthetic construct
  source 1..19: mol_type = other RNA
tctcagctaatgaagagtc

SEQ ID NO: 409 - RNA, 19 nt, synthetic construct
  source 1..19: mol_type = other RNA
ctcagctaatgaagagtct

SEQ ID NO: 410 - RNA, 19 nt, synthetic construct
  source 1..19: mol_type = other RNA
tcagctaatgaagagtctc

SEQ ID NO: 411 - RNA, 19 nt, synthetic construct
  source 1..19: mol_type = other RNA
cagctaatgaagagtctct

SEQ ID NO: 412 - RNA, 19 nt, synthetic construct
  source 1..19: mol_type = other RNA
agctaatgaagagtctctc

SEQ ID NO: 413 - RNA, 19 nt, synthetic construct
  source 1..19: mol_type = other RNA
gctaatgaagagtctctct

SEQ ID NO: 414 - RNA, 19 nt, synthetic construct
  source 1..19: mol_type = other RNA
ctaatgaagagtctctcta

SEQ ID NO: 415 - RNA, 19 nt, synthetic construct
  source 1..19: mol_type = other RNA
taatgaagagtctctctat

SEQ ID NO: 416 - RNA, 19 nt, synthetic construct
  source 1..19: mol_type = other RNA
aatgaagagtctctctatt

SEQ ID NO: 417 - RNA, 19 nt, synthetic construct
  source 1..19: mol_type = other RNA
atgaagagtctctctatta

SEQ ID NO: 418 - RNA, 19 nt, synthetic construct
  source 1..19: mol_type = other RNA
tgaagagtctctctattat

SEQ ID NO: 419 - RNA, 19 nt, synthetic construct
  source 1..19: mol_type = other RNA
gaagagtctctctattata

SEQ ID NO: 420 - RNA, 19 nt, synthetic construct
  source 1..19: mol_type = other RNA
aagagtctctctattatat

SEQ ID NO: 421 - RNA, 19 nt, synthetic construct
  source 1..19: mol_type = other RNA
agagtctctctattatatt

SEQ ID NO: 422 - RNA, 19 nt, synthetic construct
  source 1..19: mol_type = other RNA
gagtctctctattatattg

SEQ ID NO: 423 - RNA, 19 nt, synthetic construct
  source 1..19: mol_type = other RNA
agtctctctattatattga

SEQ ID NO: 424 - RNA, 19 nt, synthetic construct
  source 1..19: mol_type = other RNA
gtctctctattatattgaa

SEQ ID NO: 425 - RNA, 19 nt, synthetic construct
  source 1..19: mol_type = other RNA
tctctctattatattgaag

SEQ ID NO: 426 - RNA, 19 nt, synthetic construct
  source 1..19: mol_type = other RNA
ctctctattatattgaaga

SEQ ID NO: 427 - RNA, 19 nt, synthetic construct
  source 1..19: mol_type = other RNA
tctctattatattgaagag

SEQ ID NO: 428 - RNA, 19 nt, synthetic construct
  source 1..19: mol_type = other RNA
ctctattatattgaagagc

SEQ ID NO: 429 - RNA, 19 nt, synthetic construct
  source 1..19: mol_type = other RNA
tctattatattgaagagct

SEQ ID NO: 430 - RNA, 19 nt, synthetic construct
  source 1..19: mol_type = other RNA
ctattatattgaagagctg

SEQ ID NO: 431 - RNA, 19 nt, synthetic construct
  source 1..19: mol_type = other RNA
tattatattgaagagctga

SEQ ID NO: 432 - RNA, 19 nt, synthetic construct
  source 1..19: mol_type = other RNA
attatattgaagagctgat

SEQ ID NO: 433 - RNA, 19 nt, synthetic construct
  source 1..19: mol_type = other RNA
ttatattgaagagctgatt

SEQ ID NO: 434 - RNA, 19 nt, synthetic construct
  source 1..19: mol_type = other RNA
tatattgaagagctgattt

SEQ ID NO: 435 - RNA, 19 nt, synthetic construct
  source 1..19: mol_type = other RNA
atattgaagagctgatttt

SEQ ID NO: 436 - RNA, 19 nt, synthetic construct
  source 1..19: mol_type = other RNA
tattgaagagctgattttt

SEQ ID NO: 437 - RNA, 19 nt, synthetic construct
  source 1..19: mol_type = other RNA
attgaagagctgatttttc

SEQ ID NO: 438 - RNA, 19 nt, synthetic construct
  source 1..19: mol_type = other RNA
ttgaagagctgatttttca

SEQ ID NO: 439 - RNA, 19 nt, synthetic construct
  source 1..19: mol_type = other RNA
tgaagagctgatttttcag

SEQ ID NO: 440 - RNA, 19 nt, synthetic construct
  source 1..19: mol_type = other RNA
gaagagctgatttttcagc

SEQ ID NO: 441 - RNA, 19 nt, synthetic construct
  source 1..19: mol_type = other RNA
aagagctgatttttcagct

SEQ ID NO: 442 - RNA, 19 nt, synthetic construct
  source 1..19: mol_type = other RNA
agagctgatttttcagctg

SEQ ID NO: 443 - RNA, 19 nt, synthetic construct
  source 1..19: mol_type = other RNA
gagctgatttttcagctgc

SEQ ID NO: 444 - RNA, 19 nt, synthetic construct
  source 1..19: mol_type = other RNA
agctgatttttcagctgct

SEQ ID NO: 445 - RNA, 19 nt, synthetic construct
  source 1..19: mol_type = other RNA
gctgatttttcagctgctt

SEQ ID NO: 446 - RNA, 19 nt, synthetic construct
  source 1..19: mol_type = other RNA
ctgatttttcagctgctta

SEQ ID NO: 447 - RNA, 19 nt, synthetic construct
  source 1..19: mol_type = other RNA
tgatttttcagctgcttaa

SEQ ID NO: 448 - RNA, 19 nt, synthetic construct
  source 1..19: mol_type = other RNA
gatttttcagctgcttaat

SEQ ID NO: 449 - RNA, 19 nt, synthetic construct
  source 1..19: mol_type = other RNA
atttttcagctgcttaata

SEQ ID NO: 450 - RNA, 19 nt, synthetic construct
  source 1..19: mol_type = other RNA
tttttcagctgcttaataa

SEQ ID NO: 451 - RNA, 19 nt, synthetic construct
  source 1..19: mol_type = other RNA
ttttcagctgcttaataaa

SEQ ID NO: 452 - RNA, 19 nt, synthetic construct
  source 1..19: mol_type = other RNA
tttcagctgcttaataaat

SEQ ID NO: 453 - RNA, 19 nt, synthetic construct
  source 1..19: mol_type = other RNA
ttcagctgcttaataaatt

SEQ ID NO: 454 - RNA, 19 nt, synthetic construct
  source 1..19: mol_type = other RNA
tcagctgcttaataaatta

SEQ ID NO: 455 - RNA, 19 nt, synthetic construct
  source 1..19: mol_type = other RNA
cagctgcttaataaattat

SEQ ID NO: 456 - RNA, 19 nt, synthetic construct
  source 1..19: mol_type = other RNA
agctgcttaataaattatg

SEQ ID NO: 457 - RNA, 19 nt, synthetic construct
  source 1..19: mol_type = other RNA
gctgcttaataaattatgc

SEQ ID NO: 458 - RNA, 19 nt, synthetic construct
  source 1..19: mol_type = other RNA
ctgcttaataaattatgca

SEQ ID NO: 459 - RNA, 19 nt, synthetic construct
  source 1..19: mol_type = other RNA
tgcttaataaattatgcat

SEQ ID NO: 460 - RNA, 19 nt, synthetic construct
  source 1..19: mol_type = other RNA
gcttaataaattatgcatg

SEQ ID NO: 461 - RNA, 19 nt, synthetic construct
  source 1..19: mol_type = other RNA
cttaataaattatgcatgg

SEQ ID NO: 462 - RNA, 19 nt, synthetic construct
  source 1..19: mol_type = other RNA
ttaataaattatgcatggc

SEQ ID NO: 463 - RNA, 19 nt, synthetic construct
  source 1..19: mol_type = other RNA
taataaattatgcatggcc

SEQ ID NO: 464 - RNA, 19 nt, synthetic construct
  source 1..19: mol_type = other RNA
aataaattatgcatggccc

SEQ ID NO: 465 - RNA, 19 nt, synthetic construct
  source 1..19: mol_type = other RNA
ataaattatgcatggccca

SEQ ID NO: 466 - RNA, 19 nt, synthetic construct
  source 1..19: mol_type = other RNA
taaattatgcatggcccag

SEQ ID NO: 467 - RNA, 19 nt, synthetic construct
  source 1..19: mol_type = other RNA
aaattatgcatggcccagc

SEQ ID NO: 468 - RNA, 19 nt, synthetic construct
  source 1..19: mol_type = other RNA
aattatgcatggcccagcc

SEQ ID NO: 469 - RNA, 19 nt, synthetic construct
  source 1..19: mol_type = other RNA
attatgcatggcccagcca

SEQ ID NO: 470 - RNA, 19 nt, synthetic construct
  source 1..19: mol_type = other RNA
ttatgcatggcccagccaa

SEQ ID NO: 471 - RNA, 19 nt, synthetic construct
  source 1..19: mol_type = other RNA
tatgcatggcccagccaag

SEQ ID NO: 472 - RNA, 19 nt, synthetic construct
  source 1..19: mol_type = other RNA
atgcatggcccagccaagg

SEQ ID NO: 473 - RNA, 19 nt, synthetic construct
  source 1..19: mol_type = other RNA
tgcatggcccagccaagga

SEQ ID NO: 474 - RNA, 19 nt, synthetic construct
  source 1..19: mol_type = other RNA
gcatggcccagccaaggac

SEQ ID NO: 475 - RNA, 19 nt, synthetic construct
  source 1..19: mol_type = other RNA
catggcccagccaaggact

SEQ ID NO: 476 - RNA, 19 nt, synthetic construct
  source 1..19: mol_type = other RNA
atggcccagccaaggactg

SEQ ID NO: 477 - RNA, 19 nt, synthetic construct
  source 1..19: mol_type = other RNA
tggcccagccaaggactgt

SEQ ID NO: 478 - RNA, 19 nt, synthetic construct
  source 1..19: mol_type = other RNA
ggcccagccaaggactgtt

SEQ ID NO: 479 - RNA, 19 nt, synthetic construct
  source 1..19: mol_type = other RNA
gcccagccaaggactgttc

SEQ ID NO: 480 - RNA, 19 nt, synthetic construct
  source 1..19: mol_type = other RNA
cccagccaaggactgttca

SEQ ID NO: 481 - RNA, 19 nt, synthetic construct
  source 1..19: mol_type = other RNA
ccagccaaggactgttcaa

SEQ ID NO: 482 - RNA, 19 nt, synthetic construct
  source 1..19: mol_type = other RNA
cagccaaggactgttcaag

SEQ ID NO: 483 - RNA, 19 nt, synthetic construct
  source 1..19: mol_type = other RNA
agccaaggactgttcaaga

SEQ ID NO: 484 - RNA, 19 nt, synthetic construct
  source 1..19: mol_type = other RNA
gccaaggactgttcaagat

SEQ ID NO: 485 - RNA, 19 nt, synthetic construct
  source 1..19: mol_type = other RNA
ccaaggactgttcaagatg

SEQ ID NO: 486 - RNA, 19 nt, synthetic construct
  source 1..19: mol_type = other RNA
caaggactgttcaagatgt

SEQ ID NO: 487 - RNA, 19 nt, synthetic construct
  source 1..19: mol_type = other RNA
aaggactgttcaagatgta

SEQ ID NO: 488 - RNA, 19 nt, synthetic construct
  source 1..19: mol_type = other RNA
aggactgttcaagatgtag

SEQ ID NO: 489 - RNA, 19 nt, synthetic construct
  source 1..19: mol_type = other RNA
ggactgttcaagatgtaga

SEQ ID NO: 490 - RNA, 19 nt, synthetic construct
  source 1..19: mol_type = other RNA
gactgttcaagatgtagag

SEQ ID NO: 491 - RNA, 19 nt, synthetic construct
  source 1..19: mol_type = other RNA
actgttcaagatgtagagg

SEQ ID NO: 492 - RNA, 19 nt, synthetic construct
  source 1..19: mol_type = other RNA
ctgttcaagatgtagagga

SEQ ID NO: 493 - RNA, 19 nt, synthetic construct
  source 1..19: mol_type = other RNA
tgttcaagatgtagaggag

SEQ ID NO: 494 - RNA, 19 nt, synthetic construct
  source 1..19: mol_type = other RNA
gttcaagatgtagaggagc

SEQ ID NO: 495 - RNA, 19 nt, synthetic construct
  source 1..19: mol_type = other RNA
ttcaagatgtagaggagcg

SEQ ID NO: 496 - RNA, 19 nt, synthetic construct
  source 1..19: mol_type = other RNA
tcaagatgtagaggagcga

SEQ ID NO: 497 - RNA, 19 nt, synthetic construct
  source 1..19: mol_type = other RNA
caagatgtagaggagcgag

SEQ ID NO: 498 - RNA, 19 nt, synthetic construct
  source 1..19: mol_type = other RNA
aagatgtagaggagcgagt

SEQ ID NO: 499 - RNA, 19 nt, synthetic construct
  source 1..19: mol_type = other RNA
agatgtagaggagcgagtt

SEQ ID NO: 500 - RNA, 19 nt, synthetic construct
  source 1..19: mol_type = other RNA
gatgtagaggagcgagttc

SEQ ID NO: 501 - RNA, 19 nt, synthetic construct
  source 1..19: mol_type = other RNA
atgtagaggagcgagttca

SEQ ID NO: 502 - RNA, 19 nt, synthetic construct
  source 1..19: mol_type = other RNA
tgtagaggagcgagttcag

SEQ ID NO: 503 - RNA, 19 nt, synthetic construct
  source 1..19: mol_type = other RNA
gtagaggagcgagttcaga

SEQ ID NO: 504 - RNA, 19 nt, synthetic construct
  source 1..19: mol_type = other RNA
tagaggagcgagttcagaa

SEQ ID NO: 505 - RNA, 19 nt, synthetic construct
  source 1..19: mol_type = other RNA
agaggagcgagttcagaag

SEQ ID NO: 506 - RNA, 19 nt, synthetic construct
  source 1..19: mol_type = other RNA
gaggagcgagttcagaaga

SEQ ID NO: 507 - RNA, 19 nt, synthetic construct
  source 1..19: mol_type = other RNA
aggagcgagttcagaagac

SEQ ID NO: 508 - RNA, 19 nt, synthetic construct
  source 1..19: mol_type = other RNA
ggagcgagttcagaagacc

SEQ ID NO: 509 - RNA, 19 nt, synthetic construct
  source 1..19: mol_type = other RNA
gagcgagttcagaagacct

SEQ ID NO: 510 - RNA, 19 nt, synthetic construct
  source 1..19: mol_type = other RNA
agcgagttcagaagacctt

SEQ ID NO: 511 - RNA, 19 nt, synthetic construct
  source 1..19: mol_type = other RNA
gcgagttcagaagaccttt

SEQ ID NO: 512 - RNA, 19 nt, synthetic construct
  source 1..19: mol_type = other RNA
cgagttcagaagacctttc

SEQ ID NO: 513 - RNA, 19 nt, synthetic construct
  source 1..19: mol_type = other RNA
gagttcagaagacctttcc

SEQ ID NO: 514 - RNA, 19 nt, synthetic construct
  source 1..19: mol_type = other RNA
agttcagaagacctttcct

SEQ ID NO: 515 - RNA, 19 nt, synthetic construct
  source 1..19: mol_type = other RNA
gttcagaagacctttcctc

SEQ ID NO: 516 - RNA, 19 nt, synthetic construct
  source 1..19: mol_type = other RNA
ttcagaagacctttcctca

SEQ ID NO: 517 - RNA, 19 nt, synthetic construct
  source 1..19: mol_type = other RNA
tcagaagacctttcctcac

SEQ ID NO: 518 - RNA, 19 nt, synthetic construct
  source 1..19: mol_type = other RNA
cagaagacctttcctcacc

SEQ ID NO: 519 - RNA, 19 nt, synthetic construct
  source 1..19: mol_type = other RNA
agaagacctttcctcaccc

SEQ ID NO: 520 - RNA, 19 nt, synthetic construct
  source 1..19: mol_type = other RNA
gaagacctttcctcaccca

SEQ ID NO: 521 - RNA, 19 nt, synthetic construct
  source 1..19: mol_type = other RNA
aagacctttcctcacccaa

SEQ ID NO: 522 - RNA, 19 nt, synthetic construct
  source 1..19: mol_type = other RNA
agacctttcctcacccaat

SEQ ID NO: 523 - RNA, 19 nt, synthetic construct
  source 1..19: mol_type = other RNA
gacctttcctcacccaatt

SEQ ID NO: 524 - RNA, 19 nt, synthetic construct
  source 1..19: mol_type = other RNA
acctttcctcacccaattg

SEQ ID NO: 525 - RNA, 19 nt, synthetic construct
  source 1..19: mol_type = other RNA
cctttcctcacccaattga

SEQ ID NO: 526 - RNA, 19 nt, synthetic construct
  source 1..19: mol_type = other RNA
ctttcctcacccaattgat

SEQ ID NO: 527 - RNA, 19 nt, synthetic construct
  source 1..19: mol_type = other RNA
tttcctcacccaattgata

SEQ ID NO: 528 - RNA, 19 nt, synthetic construct
  source 1..19: mol_type = other RNA
ttcctcacccaattgataa

SEQ ID NO: 529 - RNA, 19 nt, synthetic construct
  source 1..19: mol_type = other RNA
tcctcacccaattgataaa

SEQ ID NO: 530 - RNA, 19 nt, synthetic construct
  source 1..19: mol_type = other RNA
cctcacccaattgataaat

SEQ ID NO: 531 - RNA, 19 nt, synthetic construct
  source 1..19: mol_type = other RNA
ctcacccaattgataaatg

SEQ ID NO: 532 - RNA, 19 nt, synthetic construct
  source 1..19: mol_type = other RNA
tcacccaattgataaatgg

SEQ ID NO: 533 - RNA, 19 nt, synthetic construct
  source 1..19: mol_type = other RNA
cacccaattgataaatggg

SEQ ID NO: 534 - RNA, 19 nt, synthetic construct
  source 1..19: mol_type = other RNA
acccaattgataaatgggc

SEQ ID NO: 535 - RNA, 19 nt, synthetic construct
  source 1..19: mol_type = other RNA
cccaattgataaatgggcc

SEQ ID NO: 536 - RNA, 19 nt, synthetic construct
  source 1..19: mol_type = other RNA
ccaattgataaatgggcca

SEQ ID NO: 537 - RNA, 19 nt, synthetic construct
  source 1..19: mol_type = other RNA
caattgataaatgggccat

SEQ ID NO: 538 - RNA, 19 nt, synthetic construct
  source 1..19: mol_type = other RNA
aattgataaatgggccatt

SEQ ID NO: 539 - RNA, 19 nt, synthetic construct
  source 1..19: mol_type = other RNA
attgataaatgggccattg

SEQ ID NO: 540 - RNA, 19 nt, synthetic construct
  source 1..19: mol_type = other RNA
ttgataaatgggccattgc

SEQ ID NO: 541 - RNA, 19 nt, synthetic construct
  source 1..19: mol_type = other RNA
tgataaatgggccattgct

SEQ ID NO: 542 - RNA, 19 nt, synthetic construct
  source 1..19: mol_type = other RNA
gataaatgggccattgctg

SEQ ID NO: 543 - RNA, 19 nt, synthetic construct
  source 1..19: mol_type = other RNA
ataaatgggccattgctga

SEQ ID NO: 544 - RNA, 19 nt, synthetic construct
  source 1..19: mol_type = other RNA
taaatgggccattgctgat

SEQ ID NO: 545 - RNA, 19 nt, synthetic construct
  source 1..19: mol_type = other RNA
aaatgggccattgctgatg

SEQ ID NO: 546 - RNA, 19 nt, synthetic construct
  source 1..19: mol_type = other RNA
aatgggccattgctgatgc

SEQ ID NO: 547 - RNA, 19 nt, synthetic construct
  source 1..19: mol_type = other RNA
atgggccattgctgatgca

SEQ ID NO: 548 - RNA, 19 nt, synthetic construct
  source 1..19: mol_type = other RNA
tgggccattgctgatgcac

SEQ ID NO: 549 - RNA, 19 nt, synthetic construct
  source 1..19: mol_type = other RNA
gggccattgctgatgcaca

SEQ ID NO: 550 - RNA, 19 nt, synthetic construct
  source 1..19: mol_type = other RNA
ggccattgctgatgcacaa

SEQ ID NO: 551 - RNA, 19 nt, synthetic construct
  source 1..19: mol_type = other RNA
gccattgctgatgcacaat

SEQ ID NO: 552 - RNA, 19 nt, synthetic construct
  source 1..19: mol_type = other RNA
ccattgctgatgcacaatc

SEQ ID NO: 553 - RNA, 19 nt, synthetic construct
  source 1..19: mol_type = other RNA
cattgctgatgcacaatct

SEQ ID NO: 554 - RNA, 19 nt, synthetic construct
  source 1..19: mol_type = other RNA
attgctgatgcacaatctg

SEQ ID NO: 555 - RNA, 19 nt, synthetic construct
  source 1..19: mol_type = other RNA
ttgctgatgcacaatctgc

SEQ ID NO: 556 - RNA, 19 nt, synthetic construct
  source 1..19: mol_type = other RNA
tgctgatgcacaatctgct

SEQ ID NO: 557 - RNA, 19 nt, synthetic construct
  source 1..19: mol_type = other RNA
gctgatgcacaatctgcta

SEQ ID NO: 558 - RNA, 19 nt, synthetic construct
  source 1..19: mol_type = other RNA
ctgatgcacaatctgctat

SEQ ID NO: 559 - RNA, 19 nt, synthetic construct
  source 1..19: mol_type = other RNA
tgatgcacaatctgctata

SEQ ID NO: 560 - RNA, 19 nt, synthetic construct
  source 1..19: mol_type = other RNA
gatgcacaatctgctatag

SEQ ID NO: 561 - RNA, 19 nt, synthetic construct
  source 1..19: mol_type = other RNA
atgcacaatctgctataga

SEQ ID NO: 562 - RNA, 19 nt, synthetic construct
  source 1..19: mol_type = other RNA
tgcacaatctgctatagaa

SEQ ID NO: 563 - RNA, 19 nt, synthetic construct
  source 1..19: mol_type = other RNA
gcacaatctgctatagaaa

SEQ ID NO: 564 - RNA, 19 nt, synthetic construct
  source 1..19: mol_type = other RNA
cacaatctgctatagaaaa

SEQ ID NO: 565 - RNA, 19 nt, synthetic construct
  source 1..19: mol_type = other RNA
acaatctgctatagaaaaa

SEQ ID NO: 566 - RNA, 19 nt, synthetic construct
  source 1..19: mol_type = other RNA
caatctgctatagaaaaac

SEQ ID NO: 567 - RNA, 19 nt, synthetic construct
  source 1..19: mol_type = other RNA
aatctgctatagaaaaacg

SEQ ID NO: 568 - RNA, 19 nt, synthetic construct
  source 1..19: mol_type = other RNA
atctgctatagaaaaacga

SEQ ID NO: 569 - RNA, 19 nt, synthetic construct
  source 1..19: mol_type = other RNA
tctgctatagaaaaacgaa

SEQ ID NO: 570 - RNA, 19 nt, synthetic construct
  source 1..19: mol_type = other RNA
ctgctatagaaaaacgaaa

SEQ ID NO: 571 - RNA, 19 nt, synthetic construct
  source 1..19: mol_type = other RNA
tgctatagaaaaacgaaaa

SEQ ID NO: 572 - RNA, 19 nt, synthetic construct
  source 1..19: mol_type = other RNA
gctatagaaaaacgaaaac

SEQ ID NO: 573 - RNA, 19 nt, synthetic construct
  source 1..19: mol_type = other RNA
ctatagaaaaacgaaaacg

SEQ ID NO: 574 - RNA, 19 nt, synthetic construct
  source 1..19: mol_type = other RNA
tatagaaaaacgaaaacga

SEQ ID NO: 575 - RNA, 19 nt, synthetic construct
  source 1..19: mol_type = other RNA
atagaaaaacgaaaacgaa

SEQ ID NO: 576 - RNA, 19 nt, synthetic construct
  source 1..19: mol_type = other RNA
tagaaaaacgaaaacgaag

SEQ ID NO: 577 - RNA, 19 nt, synthetic construct
  source 1..19: mol_type = other RNA
agaaaaacgaaaacgaaga

SEQ ID NO: 578 - RNA, 19 nt, synthetic construct
  source 1..19: mol_type = other RNA
gaaaaacgaaaacgaagaa

SEQ ID NO: 579 - RNA, 19 nt, synthetic construct
  source 1..19: mol_type = other RNA
aaaaacgaaaacgaagaaa

SEQ ID NO: 580 - RNA, 19 nt, synthetic construct
  source 1..19: mol_type = other RNA
aaaacgaaaacgaagaaat

SEQ ID NO: 581 - RNA, 19 nt, synthetic construct
  source 1..19: mol_type = other RNA
aaacgaaaacgaagaaatc

SEQ ID NO: 582 - RNA, 19 nt, synthetic construct
  source 1..19: mol_type = other RNA
aacgaaaacgaagaaatcc

SEQ ID NO: 583 - RNA, 19 nt, synthetic construct
  source 1..19: mol_type = other RNA
acgaaaacgaagaaatcct

SEQ ID NO: 584 - RNA, 19 nt, synthetic construct
  source 1..19: mol_type = other RNA
cgaaaacgaagaaatcctc

SEQ ID NO: 585 - RNA, 19 nt, synthetic construct
  source 1..19: mol_type = other RNA
gaaaacgaagaaatcctct

SEQ ID NO: 586 - RNA, 19 nt, synthetic construct
  source 1..19: mol_type = other RNA
aaaacgaagaaatcctctt

SEQ ID NO: 587 - RNA, 19 nt, synthetic construct
  source 1..19: mol_type = other RNA
aaacgaagaaatcctcttt

SEQ ID NO: 588 - RNA, 19 nt, synthetic construct
  source 1..19: mol_type = other RNA
aacgaagaaatcctctttt

SEQ ID NO: 589 - RNA, 19 nt, synthetic construct
  source 1..19: mol_type = other RNA
acgaagaaatcctctttta

SEQ ID NO: 590 - RNA, 19 nt, synthetic construct
  source 1..19: mol_type = other RNA
cgaagaaatcctcttttac

SEQ ID NO: 591 - RNA, 19 nt, synthetic construct
  source 1..19: mol_type = other RNA
gaagaaatcctcttttact

SEQ ID NO: 592 - RNA, 19 nt, synthetic construct
  source 1..19: mol_type = other RNA
aagaaatcctcttttactg

SEQ ID NO: 593 - RNA, 19 nt, synthetic construct
  source 1..19: mol_type = other RNA
agaaatcctcttttactgc

SEQ ID NO: 594 - RNA, 19 nt, synthetic construct
  source 1..19: mol_type = other RNA
gaaatcctcttttactgcc

SEQ ID NO: 595 - RNA, 19 nt, synthetic construct
  source 1..19: mol_type = other RNA
aaatcctcttttactgcct

SEQ ID NO: 596 - RNA, 19 nt, synthetic construct
  source 1..19: mol_type = other RNA
aatcctcttttactgcctg

SEQ ID NO: 597 - RNA, 19 nt, synthetic construct
  source 1..19: mol_type = other RNA
atcctcttttactgcctgt

SEQ ID NO: 598 - RNA, 19 nt, synthetic construct
  source 1..19: mol_type = other RNA
tcctcttttactgcctgtg

SEQ ID NO: 599 - RNA, 19 nt, synthetic construct
  source 1..19: mol_type = other RNA
cctcttttactgcctgtgg

SEQ ID NO: 600 - RNA, 19 nt, synthetic construct
  source 1..19: mol_type = other RNA
ctcttttactgcctgtgga

SEQ ID NO: 601 - RNA, 19 nt, synthetic construct
  source 1..19: mol_type = other RNA
tcttttactgcctgtggac

SEQ ID NO: 602 - RNA, 19 nt, synthetic construct
  source 1..19: mol_type = other RNA
cttttactgcctgtggaca

SEQ ID NO: 603 - RNA, 19 nt, synthetic construct
  source 1..19: mol_type = other RNA
ttttactgcctgtggacaa

SEQ ID NO: 604 - RNA, 19 nt, synthetic construct
  source 1..19: mol_type = other RNA
tttactgcctgtggacaaa

SEQ ID NO: 605 - RNA, 19 nt, synthetic construct
  source 1..19: mol_type = other RNA
ttactgcctgtggacaaaa

SEQ ID NO: 606 - RNA, 19 nt, synthetic construct
  source 1..19: mol_type = other RNA
tactgcctgtggacaaaat

SEQ ID NO: 607 - RNA, 19 nt, synthetic construct
  source 1..19: mol_type = other RNA
actgcctgtggacaaaatc

SEQ ID NO: 608 - RNA, 19 nt, synthetic construct
  source 1..19: mol_type = other RNA
ctgcctgtggacaaaatcc

SEQ ID NO: 609 - RNA, 19 nt, synthetic construct
  source 1..19: mol_type = other RNA
tgcctgtggacaaaatcca

SEQ ID NO: 610 - RNA, 19 nt, synthetic construct
  source 1..19: mol_type = other RNA
gcctgtggacaaaatccat

SEQ ID NO: 611 - RNA, 19 nt, synthetic construct
  source 1..19: mol_type = other RNA
cctgtggacaaaatccatc

SEQ ID NO: 612 - RNA, 19 nt, synthetic construct
  source 1..19: mol_type = other RNA
ctgtggacaaaatccatcc

SEQ ID NO: 613 - RNA, 19 nt, synthetic construct
  source 1..19: mol_type = other RNA
tgtggacaaaatccatcct

SEQ ID NO: 614 - RNA, 19 nt, synthetic construct
  source 1..19: mol_type = other RNA
gtggacaaaatccatcctt

SEQ ID NO: 615 - RNA, 19 nt, synthetic construct
  source 1..19: mol_type = other RNA
tggacaaaatccatccttc

SEQ ID NO: 616 - RNA, 19 nt, synthetic construct
  source 1..19: mol_type = other RNA
ggacaaaatccatccttcg

SEQ ID NO: 617 - RNA, 19 nt, synthetic construct
  source 1..19: mol_type = other RNA
gacaaaatccatccttcgt

SEQ ID NO: 618 - RNA, 19 nt, synthetic construct
  source 1..19: mol_type = other RNA
acaaaatccatccttcgtt

SEQ ID NO: 619 - RNA, 19 nt, synthetic construct
  source 1..19: mol_type = other RNA
caaaatccatccttcgttg

SEQ ID NO: 620 - RNA, 19 nt, synthetic construct
  source 1..19: mol_type = other RNA
aaaatccatccttcgttga

SEQ ID NO: 621 - RNA, 19 nt, synthetic construct
  source 1..19: mol_type = other RNA
aaatccatccttcgttgaa

SEQ ID NO: 622 - RNA, 19 nt, synthetic construct
  source 1..19: mol_type = other RNA
aatccatccttcgttgaag

SEQ ID NO: 623 - RNA, 19 nt, synthetic construct
  source 1..19: mol_type = other RNA
atccatccttcgttgaagg

SEQ ID NO: 624 - RNA, 19 nt, synthetic construct
  source 1..19: mol_type = other RNA
tccatccttcgttgaagga

SEQ ID NO: 625 - RNA, 19 nt, synthetic construct
  source 1..19: mol_type = other RNA
ccatccttcgttgaaggaa

SEQ ID NO: 626 - RNA, 19 nt, synthetic construct
  source 1..19: mol_type = other RNA
catccttcgttgaaggaag

SEQ ID NO: 627 - RNA, 19 nt, synthetic construct
  source 1..19: mol_type = other RNA
atccttcgttgaaggaagt

SEQ ID NO: 628 - RNA, 19 nt, synthetic construct
  source 1..19: mol_type = other RNA
tccttcgttgaaggaagta

SEQ ID NO: 629 - RNA, 19 nt, synthetic construct
  source 1..19: mol_type = other RNA
ccttcgttgaaggaagtat

SEQ ID NO: 630 - RNA, 19 nt, synthetic construct
  source 1..19: mol_type = other RNA
cttcgttgaaggaagtatt

SEQ ID NO: 631 - RNA, 19 nt, synthetic construct
  source 1..19: mol_type = other RNA
ttcgttgaaggaagtatta

SEQ ID NO: 632 - RNA, 19 nt, synthetic construct
  source 1..19: mol_type = other RNA
tcgttgaaggaagtattag

SEQ ID NO: 633 - RNA, 19 nt, synthetic construct
  source 1..19: mol_type = other RNA
cgttgaaggaagtattagg

SEQ ID NO: 634 - RNA, 19 nt, synthetic construct
  source 1..19: mol_type = other RNA
gttgaaggaagtattaggg

SEQ ID NO: 635 - RNA, 19 nt, synthetic construct
  source 1..19: mol_type = other RNA
ttgaaggaagtattagggt

SEQ ID NO: 636 - RNA, 19 nt, synthetic construct
  source 1..19: mol_type = other RNA
tgaaggaagtattagggta

SEQ ID NO: 637 - RNA, 19 nt, synthetic construct
  source 1..19: mol_type = other RNA
gaaggaagtattagggtac

SEQ ID NO: 638 - RNA, 19 nt, synthetic construct
  source 1..19: mol_type = other RNA
aaggaagtattagggtaca

SEQ ID NO: 639 - RNA, 19 nt, synthetic construct
  source 1..19: mol_type = other RNA
aggaagtattagggtacaa

SEQ ID NO: 640 - RNA, 19 nt, synthetic construct
  source 1..19: mol_type = other RNA
ggaagtattagggtacaaa

SEQ ID NO: 641 - RNA, 19 nt, synthetic construct
  source 1..19: mol_type = other RNA
gaagtattagggtacaaag

SEQ ID NO: 642 - RNA, 19 nt, synthetic construct
  source 1..19: mol_type = other RNA
aagtattagggtacaaagt

SEQ ID NO: 643 - RNA, 19 nt, synthetic construct
  source 1..19: mol_type = other RNA
agtattagggtacaaagtg

SEQ ID NO: 644 - RNA, 19 nt, synthetic construct
  source 1..19: mol_type = other RNA
gtattagggtacaaagtgg

SEQ ID NO: 645 - RNA, 19 nt, synthetic construct
  source 1..19: mol_type = other RNA
tattagggtacaaagtgga

SEQ ID NO: 646 - RNA, 19 nt, synthetic construct
  source 1..19: mol_type = other RNA
attagggtacaaagtggac

SEQ ID NO: 647 - RNA, 19 nt, synthetic construct
  source 1..19: mol_type = other RNA
ttagggtacaaagtggact

SEQ ID NO: 648 - RNA, 19 nt, synthetic construct
  source 1..19: mol_type = other RNA
tagggtacaaagtggacta

SEQ ID NO: 649 - RNA, 19 nt, synthetic construct
  source 1..19: mol_type = other RNA
agggtacaaagtggactac

SEQ ID NO: 650 - RNA, 19 nt, synthetic construct
  source 1..19: mol_type = other RNA
gggtacaaagtggactacc

SEQ ID NO: 651 - RNA, 19 nt, synthetic construct
  source 1..19: mol_type = other RNA
ggtacaaagtggactacca

SEQ ID NO: 652 - RNA, 19 nt, synthetic construct
  source 1..19: mol_type = other RNA
gtacaaagtggactaccat

SEQ ID NO: 653 - RNA, 19 nt, synthetic construct
  source 1..19: mol_type = other RNA
tacaaagtggactaccatg

SEQ ID NO: 654 - RNA, 19 nt, synthetic construct
  source 1..19: mol_type = other RNA
acaaagtggactaccatgt

SEQ ID NO: 655 - RNA, 19 nt, synthetic construct
  source 1..19: mol_type = other RNA
caaagtggactaccatgta

SEQ ID NO: 656 - RNA, 19 nt, synthetic construct
  source 1..19: mol_type = other RNA
aaagtggactaccatgtat

SEQ ID NO: 657 - RNA, 19 nt, synthetic construct
  source 1..19: mol_type = other RNA
aagtggactaccatgtatc

SEQ ID NO: 658 - RNA, 19 nt, synthetic construct
  source 1..19: mol_type = other RNA
agtggactaccatgtatcc

SEQ ID NO: 659 - RNA, 19 nt, synthetic construct
  source 1..19: mol_type = other RNA
gtggactaccatgtatccc

SEQ ID NO: 660 - RNA, 19 nt, synthetic construct
  source 1..19: mol_type = other RNA
tggactaccatgtatccct

SEQ ID NO: 661 - RNA, 19 nt, synthetic construct
  source 1..19: mol_type = other RNA
ggactaccatgtatcccta

SEQ ID NO: 662 - RNA, 19 nt, synthetic construct
  source 1..19: mol_type = other RNA
gactaccatgtatccctat

SEQ ID NO: 663 - RNA, 19 nt, synthetic construct
  source 1..19: mol_type = other RNA
actaccatgtatccctata

SEQ ID NO: 664 - RNA, 19 nt, synthetic construct
  source 1..19: mol_type = other RNA
ctaccatgtatccctatat

SEQ ID NO: 665 - RNA, 19 nt, synthetic construct
  source 1..19: mol_type = other RNA
taccatgtatccctatata

SEQ ID NO: 666 - RNA, 19 nt, synthetic construct
  source 1..19: mol_type = other RNA
accatgtatccctatatat

SEQ ID NO: 667 - RNA, 19 nt, synthetic construct
  source 1..19: mol_type = other RNA
ccatgtatccctatatatt

SEQ ID NO: 668 - RNA, 19 nt, synthetic construct
  source 1..19: mol_type = other RNA
catgtatccctatatattg

SEQ ID NO: 669 - RNA, 19 nt, synthetic construct
  source 1..19: mol_type = other RNA
atgtatccctatatattgt

SEQ ID NO: 670 - RNA, 19 nt, synthetic construct
  source 1..19: mol_type = other RNA
tgtatccctatatattgtg

SEQ ID NO: 671 - RNA, 19 nt, synthetic construct
  source 1..19: mol_type = other RNA
gtatccctatatattgtgg

SEQ ID NO: 672 - RNA, 19 nt, synthetic construct
  source 1..19: mol_type = other RNA
tatccctatatattgtggc

SEQ ID NO: 673 - RNA, 19 nt, synthetic construct
  source 1..19: mol_type = other RNA
atccctatatattgtggct

SEQ ID NO: 674 - RNA, 19 nt, synthetic construct
  source 1..19: mol_type = other RNA
tccctatatattgtggctg

SEQ ID NO: 675 - RNA, 19 nt, synthetic construct
  source 1..19: mol_type = other RNA
ccctatatattgtggctgt

SEQ ID NO: 676 - RNA, 19 nt, synthetic construct
  source 1..19: mol_type = other RNA
cctatatattgtggctgta

SEQ ID NO: 677 - RNA, 19 nt, synthetic construct
  source 1..19: mol_type = other RNA
ctatatattgtggctgtac

SEQ ID NO: 678 - RNA, 19 nt, synthetic construct
  source 1..19: mol_type = other RNA
tatatattgtggctgtact

SEQ ID NO: 679 - RNA, 19 nt, synthetic construct
  source 1..19: mol_type = other RNA
atatattgtggctgtacta

SEQ ID NO: 680 - RNA, 19 nt, synthetic construct
  source 1..19: mol_type = other RNA
tatattgtggctgtactag

SEQ ID NO: 681 - RNA, 19 nt, synthetic construct
  source 1..19: mol_type = other RNA
atattgtggctgtactaga

SEQ ID NO: 682 - RNA, 19 nt, synthetic construct
  source 1..19: mol_type = other RNA
tattgtggctgtactagag

SEQ ID NO: 683 - RNA, 19 nt, synthetic construct
  source 1..19: mol_type = other RNA
attgtggctgtactagagt

SEQ ID NO: 684 - RNA, 19 nt, synthetic construct
  source 1..19: mol_type = other RNA
ttgtggctgtactagagta

SEQ ID NO: 685 - RNA, 19 nt, synthetic construct
  source 1..19: mol_type = other RNA
tgtggctgtactagagtat

SEQ ID NO: 686 - RNA, 19 nt, synthetic construct
  source 1..19: mol_type = other RNA
gtggctgtactagagtata

SEQ ID NO: 687 - RNA, 19 nt, synthetic construct
  source 1..19: mol_type = other RNA
tggctgtactagagtatat

SEQ ID NO: 688 - RNA, 19 nt, synthetic construct
  source 1..19: mol_type = other RNA
ggctgtactagagtatatc

SEQ ID NO: 689 - RNA, 19 nt, synthetic construct
  source 1..19: mol_type = other RNA
gctgtactagagtatatct

SEQ ID NO: 690 - RNA, 19 nt, synthetic construct
  source 1..19: mol_type = other RNA
ctgtactagagtatatctc

SEQ ID NO: 691 - RNA, 19 nt, synthetic construct
  source 1..19: mol_type = other RNA
tgtactagagtatatctca

SEQ ID NO: 692 - RNA, 19 nt, synthetic construct
  source 1..19: mol_type = other RNA
gtactagagtatatctcag

SEQ ID NO: 693 - RNA, 19 nt, synthetic construct
  source 1..19: mol_type = other RNA
tactagagtatatctcagc

SEQ ID NO: 694 - RNA, 19 nt, synthetic construct
  source 1..19: mol_type = other RNA
actagagtatatctcagct

SEQ ID NO: 695 - RNA, 19 nt, synthetic construct
  source 1..19: mol_type = other RNA
ctagagtatatctcagctg

SEQ ID NO: 696 - RNA, 19 nt, synthetic construct
  source 1..19: mol_type = other RNA
tagagtatatctcagctga

SEQ ID NO: 697 - RNA, 19 nt, synthetic construct
  source 1..19: mol_type = other RNA
agagtatatctcagctgat

SEQ ID NO: 698 - RNA, 19 nt, synthetic construct
  source 1..19: mol_type = other RNA
gagtatatctcagctgata

SEQ ID NO: 699 - RNA, 19 nt, synthetic construct
  source 1..19: mol_type = other RNA
agtatatctcagctgatat

SEQ ID NO: 700 - RNA, 19 nt, synthetic construct
  source 1..19: mol_type = other RNA
gtatatctcagctgatatt

SEQ ID NO: 701 - RNA, 19 nt, synthetic construct
  source 1..19: mol_type = other RNA
tatatctcagctgatattt

SEQ ID NO: 702 - RNA, 19 nt, synthetic construct
  source 1..19: mol_type = other RNA
atatctcagctgatatttt

SEQ ID NO: 703 - RNA, 19 nt, synthetic construct
  source 1..19: mol_type = other RNA
tatctcagctgatatttta

SEQ ID NO: 704 - RNA, 19 nt, synthetic construct
  source 1..19: mol_type = other RNA
atctcagctgatattttaa

SEQ ID NO: 705 - RNA, 19 nt, synthetic construct
  source 1..19: mol_type = other RNA
tctcagctgatattttaaa

SEQ ID NO: 706 - RNA, 19 nt, synthetic construct
  source 1..19: mol_type = other RNA
ctcagctgatattttaaaa

SEQ ID NO: 707 - RNA, 19 nt, synthetic construct
  source 1..19: mol_type = other RNA
tcagctgatattttaaaat

SEQ ID NO: 708 - RNA, 19 nt, synthetic construct
  source 1..19: mol_type = other RNA
cagctgatattttaaaatt

SEQ ID NO: 709 - RNA, 19 nt, synthetic construct
  source 1..19: mol_type = other RNA
agctgatattttaaaattg

SEQ ID NO: 710 - RNA, 19 nt, synthetic construct
  source 1..19: mol_type = other RNA
gctgatattttaaaattgg

SEQ ID NO: 711 - RNA, 19 nt, synthetic construct
  source 1..19: mol_type = other RNA
ctgatattttaaaattggc

SEQ ID NO: 712 - RNA, 19 nt, synthetic construct
  source 1..19: mol_type = other RNA
tgatattttaaaattggct

SEQ ID NO: 713 - RNA, 19 nt, synthetic construct
  source 1..19: mol_type = other RNA
gatattttaaaattggctg

SEQ ID NO: 714 - RNA, 19 nt, synthetic construct
  source 1..19: mol_type = other RNA
atattttaaaattggctgg

SEQ ID NO: 715 - RNA, 19 nt, synthetic construct
  source 1..19: mol_type = other RNA
tattttaaaattggctggt

SEQ ID NO: 716 - RNA, 19 nt, synthetic construct
  source 1..19: mol_type = other RNA
attttaaaattggctggta

SEQ ID NO: 717 - RNA, 19 nt, synthetic construct
  source 1..19: mol_type = other RNA
ttttaaaattggctggtaa

SEQ ID NO: 718 - RNA, 19 nt, synthetic construct
  source 1..19: mol_type = other RNA
tttaaaattggctggtaat

SEQ ID NO: 719 - RNA, 19 nt, synthetic construct
  source 1..19: mol_type = other RNA
ttaaaattggctggtaatt

SEQ ID NO: 720 - RNA, 19 nt, synthetic construct
  source 1..19: mol_type = other RNA
taaaattggctggtaatta

SEQ ID NO: 721 - RNA, 19 nt, synthetic construct
  source 1..19: mol_type = other RNA
aaaattggctggtaattat

SEQ ID NO: 722 - RNA, 19 nt, synthetic construct
  source 1..19: mol_type = other RNA
aaattggctggtaattatg

SEQ ID NO: 723 - RNA, 19 nt, synthetic construct
  source 1..19: mol_type = other RNA
aattggctggtaattatgt

SEQ ID NO: 724 - RNA, 19 nt, synthetic construct
  source 1..19: mol_type = other RNA
attggctggtaattatgtt

SEQ ID NO: 725 - RNA, 19 nt, synthetic construct
  source 1..19: mol_type = other RNA
ttggctggtaattatgttt

SEQ ID NO: 726 - RNA, 19 nt, synthetic construct
  source 1..19: mol_type = other RNA
tggctggtaattatgtttt

SEQ ID NO: 727 - RNA, 19 nt, synthetic construct
  source 1..19: mol_type = other RNA
ggctggtaattatgttttt

SEQ ID NO: 728 - RNA, 19 nt, synthetic construct
  source 1..19: mol_type = other RNA
gctggtaattatgttttta

SEQ ID NO: 729 - RNA, 19 nt, synthetic construct
  source 1..19: mol_type = other RNA
ctggtaattatgtttttaa

SEQ ID NO: 730 - RNA, 19 nt, synthetic construct
  source 1..19: mol_type = other RNA
tggtaattatgtttttaat

SEQ ID NO: 731 - RNA, 19 nt, synthetic construct
  source 1..19: mol_type = other RNA
ggtaattatgtttttaata

SEQ ID NO: 732 - RNA, 19 nt, synthetic construct
  source 1..19: mol_type = other RNA
gtaattatgtttttaatat

SEQ ID NO: 733 - RNA, 19 nt, synthetic construct
  source 1..19: mol_type = other RNA
taattatgtttttaatatc

SEQ ID NO: 734 - RNA, 19 nt, synthetic construct
  source 1..19: mol_type = other RNA
aattatgtttttaatatcc

SEQ ID NO: 735 - RNA, 19 nt, synthetic construct
  source 1..19: mol_type = other RNA
attatgtttttaatatccg

SEQ ID NO: 736 - RNA, 19 nt, synthetic construct
  source 1..19: mol_type = other RNA
ttatgtttttaatatccgg

SEQ ID NO: 737 - RNA, 19 nt, synthetic construct
  source 1..19: mol_type = other RNA
tatgtttttaatatccggc

SEQ ID NO: 738 - RNA, 19 nt, synthetic construct
  source 1..19: mol_type = other RNA
atgtttttaatatccggca

SEQ ID NO: 739 - RNA, 19 nt, synthetic construct
  source 1..19: mol_type = other RNA
tgtttttaatatccggcat

SEQ ID NO: 740 - RNA, 19 nt, synthetic construct
  source 1..19: mol_type = other RNA
gtttttaatatccggcatt

SEQ ID NO: 741 - RNA, 19 nt, synthetic construct
  source 1..19: mol_type = other RNA
tttttaatatccggcatta

SEQ ID NO: 742 - RNA, 19 nt, synthetic construct
  source 1..19: mol_type = other RNA
ttttaatatccggcattat

SEQ ID NO: 743 - RNA, 19 nt, synthetic construct
  source 1..19: mol_type = other RNA
tttaatatccggcattatg

SEQ ID NO: 744 - RNA, 19 nt, synthetic construct
  source 1..19: mol_type = other RNA
ttaatatccggcattatga

SEQ ID NO: 745 - RNA, 19 nt, synthetic construct
  source 1..19: mol_type = other RNA
taatatccggcattatgaa

SEQ ID NO: 746 - RNA, 19 nt, synthetic construct
  source 1..19: mol_type = other RNA
aatatccggcattatgaaa

SEQ ID NO: 747 - RNA, 19 nt, synthetic construct
  source 1..19: mol_type = other RNA
atatccggcattatgaaat

SEQ ID NO: 748 - RNA, 19 nt, synthetic construct
  source 1..19: mol_type = other RNA
tatccggcattatgaaata

SEQ ID NO: 749 - RNA, 19 nt, synthetic construct
  source 1..19: mol_type = other RNA
atccggcattatgaaatat

SEQ ID NO: 750 - RNA, 19 nt, synthetic construct
  source 1..19: mol_type = other RNA
tccggcattatgaaatatc

SEQ ID NO: 751 - RNA, 19 nt, synthetic construct
  source 1..19: mol_type = other RNA
ccggcattatgaaatatct

SEQ ID NO: 752 - RNA, 19 nt, synthetic construct
  source 1..19: mol_type = other RNA
cggcattatgaaatatctc

SEQ ID NO: 753 - RNA, 19 nt, synthetic construct
  source 1..19: mol_type = other RNA
ggcattatgaaatatctca

SEQ ID NO: 754 - RNA, 19 nt, synthetic construct
  source 1..19: mol_type = other RNA
gcattatgaaatatctcag

SEQ ID NO: 755 - RNA, 19 nt, synthetic construct
  source 1..19: mol_type = other RNA
cattatgaaatatctcagc

SEQ ID NO: 756 - RNA, 19 nt, synthetic construct
  source 1..19: mol_type = other RNA
attatgaaatatctcagca

SEQ ID NO: 757 - RNA, 19 nt, synthetic construct
  source 1..19: mol_type = other RNA
ttatgaaatatctcagcag

SEQ ID NO: 758 - RNA, 19 nt, synthetic construct
  source 1..19: mol_type = other RNA
tatgaaatatctcagcagg

SEQ ID NO: 759 - RNA, 19 nt, synthetic construct
  source 1..19: mol_type = other RNA
atgaaatatctcagcagga

SEQ ID NO: 760 - RNA, 19 nt, synthetic construct
  source 1..19: mol_type = other RNA
tgaaatatctcagcaggac

SEQ ID NO: 761 - RNA, 19 nt, synthetic construct
  source 1..19: mol_type = other RNA
gaaatatctcagcaggaca

SEQ ID NO: 762 - RNA, 19 nt, synthetic construct
  source 1..19: mol_type = other RNA
aaatatctcagcaggacat

SEQ ID NO: 763 - RNA, 19 nt, synthetic construct
  source 1..19: mol_type = other RNA
aatatctcagcaggacatt

SEQ ID NO: 764 - RNA, 19 nt, synthetic construct
  source 1..19: mol_type = other RNA
atatctcagcaggacatta

SEQ ID NO: 765 - RNA, 19 nt, synthetic construct
  source 1..19: mol_type = other RNA
tatctcagcaggacattaa

SEQ ID NO: 766 - RNA, 19 nt, synthetic construct
  source 1..19: mol_type = other RNA
atctcagcaggacattaaa

SEQ ID NO: 767 - RNA, 19 nt, synthetic construct
  source 1..19: mol_type = other RNA
tctcagcaggacattaaag

SEQ ID NO: 768 - RNA, 19 nt, synthetic construct
  source 1..19: mol_type = other RNA
ctcagcaggacattaaagt

SEQ ID NO: 769 - RNA, 19 nt, synthetic construct
  source 1..19: mol_type = other RNA
tcagcaggacattaaagtg

SEQ ID NO: 770 - RNA, 19 nt, synthetic construct
  source 1..19: mol_type = other RNA
cagcaggacattaaagtgt

SEQ ID NO: 771 - RNA, 19 nt, synthetic construct
  source 1..19: mol_type = other RNA
agcaggacattaaagtgtc

SEQ ID NO: 772 - RNA, 19 nt, synthetic construct
  source 1..19: mol_type = other RNA
gcaggacattaaagtgtca

SEQ ID NO: 773 - RNA, 19 nt, synthetic construct
  source 1..19: mol_type = other RNA
caggacattaaagtgtcaa

SEQ ID NO: 774 - RNA, 19 nt, synthetic construct
  source 1..19: mol_type = other RNA
aggacattaaagtgtcaat

SEQ ID NO: 775 - RNA, 19 nt, synthetic construct
  source 1..19: mol_type = other RNA
ggacattaaagtgtcaatg

SEQ ID NO: 776 - RNA, 19 nt, synthetic construct
  source 1..19: mol_type = other RNA
gacattaaagtgtcaatgt

SEQ ID NO: 777 - RNA, 19 nt, synthetic construct
  source 1..19: mol_type = other RNA
acattaaagtgtcaatgtg

SEQ ID NO: 778 - RNA, 19 nt, synthetic construct
  source 1..19: mol_type = other RNA
cattaaagtgtcaatgtgt

SEQ ID NO: 779 - RNA, 19 nt, synthetic construct
  source 1..19: mol_type = other RNA
attaaagtgtcaatgtgtg

SEQ ID NO: 780 - RNA, 19 nt, synthetic construct
  source 1..19: mol_type = other RNA
ttaaagtgtcaatgtgtgc

SEQ ID NO: 781 - RNA, 19 nt, synthetic construct
  source 1..19: mol_type = other RNA
taaagtgtcaatgtgtgcg

SEQ ID NO: 782 - RNA, 19 nt, synthetic construct
  source 1..19: mol_type = other RNA
aaagtgtcaatgtgtgcgg

SEQ ID NO: 783 - RNA, 19 nt, synthetic construct
  source 1..19: mol_type = other RNA
aagtgtcaatgtgtgcgga

SEQ ID NO: 784 - RNA, 19 nt, synthetic construct
  source 1..19: mol_type = other RNA
agtgtcaatgtgtgcggat

SEQ ID NO: 785 - RNA, 19 nt, synthetic construct
  source 1..19: mol_type = other RNA
gtgtcaatgtgtgcggata

SEQ ID NO: 786 - RNA, 19 nt, synthetic construct
  source 1..19: mol_type = other RNA
tgtcaatgtgtgcggataa

SEQ ID NO: 787 - RNA, 19 nt, synthetic construct
  source 1..19: mol_type = other RNA
gtcaatgtgtgcggataag

SEQ ID NO: 788 - RNA, 19 nt, synthetic construct
  source 1..19: mol_type = other RNA
tcaatgtgtgcggataagg

SEQ ID NO: 789 - RNA, 19 nt, synthetic construct
  source 1..19: mol_type = other RNA
caatgtgtgcggataaggt

SEQ ID NO: 790 - RNA, 19 nt, synthetic construct
  source 1..19: mol_type = other RNA
aatgtgtgcggataaggtt

SEQ ID NO: 791 - RNA, 19 nt, synthetic construct
  source 1..19: mol_type = other RNA
atgtgtgcggataaggttt

SEQ ID NO: 792 - RNA, 19 nt, synthetic construct
  source 1..19: mol_type = other RNA
tgtgtgcggataaggtttt

SEQ ID NO: 793 - RNA, 19 nt, synthetic construct
  source 1..19: mol_type = other RNA
gtgtgcggataaggttttg

SEQ ID NO: 794 - RNA, 19 nt, synthetic construct
  source 1..19: mol_type = other RNA
tgtgcggataaggttttga

SEQ ID NO: 795 - RNA, 19 nt, synthetic construct
  source 1..19: mol_type = other RNA
gtgcggataaggttttgat

SEQ ID NO: 796 - RNA, 19 nt, synthetic construct
  source 1..19: mol_type = other RNA
tgcggataaggttttgatg

SEQ ID NO: 797 - RNA, 19 nt, synthetic construct
  source 1..19: mol_type = other RNA
gcggataaggttttgatgg

SEQ ID NO: 798 - RNA, 19 nt, synthetic construct
  source 1..19: mol_type = other RNA
cggataaggttttgatgga

SEQ ID NO: 799 - RNA, 19 nt, synthetic construct
  source 1..19: mol_type = other RNA
ggataaggttttgatggac

SEQ ID NO: 800 - RNA, 19 nt, synthetic construct
  source 1..19: mol_type = other RNA
gataaggttttgatggaca

SEQ ID NO: 801 - RNA, 19 nt, synthetic construct
  source 1..19: mol_type = other RNA
ataaggttttgatggacat

SEQ ID NO: 802 - RNA, 19 nt, synthetic construct
  source 1..19: mol_type = other RNA
taaggttttgatggacatg

SEQ ID NO: 803 - RNA, 19 nt, synthetic construct
  source 1..19: mol_type = other RNA
aaggttttgatggacatgt

SEQ ID NO: 804 - RNA, 19 nt, synthetic construct
  source 1..19: mol_type = other RNA
aggttttgatggacatgtt

SEQ ID NO: 805 - RNA, 19 nt, synthetic construct
  source 1..19: mol_type = other RNA
ggttttgatggacatgttt

SEQ ID NO: 806 - RNA, 19 nt, synthetic construct
  source 1..19: mol_type = other RNA
gttttgatggacatgtttg

SEQ ID NO: 807 - RNA, 19 nt, synthetic construct
  source 1..19: mol_type = other RNA
ttttgatggacatgtttga

SEQ ID NO: 808 - RNA, 19 nt, synthetic construct
  source 1..19: mol_type = other RNA
tttgatggacatgtttgat

SEQ ID NO: 809 - RNA, 19 nt, synthetic construct
  source 1..19: mol_type = other RNA
ttgatggacatgtttgatc

SEQ ID NO: 810 - RNA, 19 nt, synthetic construct
  source 1..19: mol_type = other RNA
tgatggacatgtttgatca

SEQ ID NO: 811 - RNA, 19 nt, synthetic construct
  source 1..19: mol_type = other RNA
gatggacatgtttgatcag

SEQ ID NO: 812 - RNA, 19 nt, synthetic construct
  source 1..19: mol_type = other RNA
atggacatgtttgatcagg

SEQ ID NO: 813 - RNA, 19 nt, synthetic construct
  source 1..19: mol_type = other RNA
tggacatgtttgatcagga

SEQ ID NO: 814 - RNA, 19 nt, synthetic construct
  source 1..19: mol_type = other RNA
ggacatgtttgatcaggat

SEQ ID NO: 815 - RNA, 19 nt, synthetic construct
  source 1..19: mol_type = other RNA
gacatgtttgatcaggatg

SEQ ID NO: 816 - RNA, 19 nt, synthetic construct
  source 1..19: mol_type = other RNA
acatgtttgatcaggatga

SEQ ID NO: 817 - RNA, 19 nt, synthetic construct
  source 1..19: mol_type = other RNA
catgtttgatcaggatgac

SEQ ID NO: 818 - RNA, 19 nt, synthetic construct
  source 1..19: mol_type = other RNA
atgtttgatcaggatgaca

SEQ ID NO: 819 - RNA, 19 nt, synthetic construct
  source 1..19: mol_type = other RNA
tgtttgatcaggatgacat

SEQ ID NO: 820 - RNA, 19 nt, synthetic construct
  source 1..19: mol_type = other RNA
gtttgatcaggatgacata

SEQ ID NO: 821 - RNA, 19 nt, synthetic construct
  source 1..19: mol_type = other RNA
tttgatcaggatgacatag

SEQ ID NO: 822 - RNA, 19 nt, synthetic construct
  source 1..19: mol_type = other RNA
ttgatcaggatgacatagg

SEQ ID NO: 823 - RNA, 19 nt, synthetic construct
  source 1..19: mol_type = other RNA
tgatcaggatgacataggt

SEQ ID NO: 824 - RNA, 19 nt, synthetic construct
  source 1..19: mol_type = other RNA
gatcaggatgacataggtt

SEQ ID NO: 825 - RNA, 19 nt, synthetic construct
  source 1..19: mol_type = other RNA
atcaggatgacataggttt

SEQ ID NO: 826 - RNA, 19 nt, synthetic construct
  source 1..19: mol_type = other RNA
tcaggatgacataggtttg

SEQ ID NO: 827 - RNA, 19 nt, synthetic construct
  source 1..19: mol_type = other RNA
caggatgacataggtttgg

SEQ ID NO: 828 - RNA, 19 nt, synthetic construct
  source 1..19: mol_type = other RNA
aggatgacataggtttggt

SEQ ID NO: 829 - RNA, 19 nt, synthetic construct
  source 1..19: mol_type = other RNA
ggatgacataggtttggtt

SEQ ID NO: 830 - RNA, 19 nt, synthetic construct
  source 1..19: mol_type = other RNA
gatgacataggtttggttt

SEQ ID NO: 831 - RNA, 19 nt, synthetic construct
  source 1..19: mol_type = other RNA
atgacataggtttggtttc

SEQ ID NO: 832 - RNA, 19 nt, synthetic construct
  source 1..19: mol_type = other RNA
tgacataggtttggtttct

SEQ ID NO: 833 - RNA, 19 nt, synthetic construct
  source 1..19: mol_type = other RNA
gacataggtttggtttctc

SEQ ID NO: 834 - RNA, 19 nt, synthetic construct
  source 1..19: mol_type = other RNA
acataggtttggtttctct

SEQ ID NO: 835 - RNA, 19 nt, synthetic construct
  source 1..19: mol_type = other RNA
cataggtttggtttctctc

SEQ ID NO: 836 - RNA, 19 nt, synthetic construct
  source 1..19: mol_type = other RNA
ataggtttggtttctctct

SEQ ID NO: 837 - RNA, 19 nt, synthetic construct
  source 1..19: mol_type = other RNA
taggtttggtttctctctg

SEQ ID NO: 838 - RNA, 19 nt, synthetic construct
  source 1..19: mol_type = other RNA
aggtttggtttctctctgt

SEQ ID NO: 839 - RNA, 19 nt, synthetic construct
  source 1..19: mol_type = other RNA
ggtttggtttctctctgtg

SEQ ID NO: 840 - RNA, 19 nt, synthetic construct
  source 1..19: mol_type = other RNA
gtttggtttctctctgtga

SEQ ID NO: 841 - RNA, 19 nt, synthetic construct
  source 1..19: mol_type = other RNA
tttggtttctctctgtgaa

SEQ ID NO: 842 - RNA, 19 nt, synthetic construct
  source 1..19: mol_type = other RNA
ttggtttctctctgtgaag

SEQ ID NO: 843 - RNA, 19 nt, synthetic construct
  source 1..19: mol_type = other RNA
tggtttctctctgtgaaga

SEQ ID NO: 844 - RNA, 19 nt, synthetic construct
  source 1..19: mol_type = other RNA
ggtttctctctgtgaagat

SEQ ID NO: 845 - RNA, 19 nt, synthetic construct
  source 1..19: mol_type = other RNA
gtttctctctgtgaagatg

SEQ ID NO: 846 - RNA, 19 nt, synthetic construct
  source 1..19: mol_type = other RNA
tttctctctgtgaagatga

SEQ ID NO: 847 - RNA, 19 nt, synthetic construct
  source 1..19: mol_type = other RNA
ttctctctgtgaagatgaa

SEQ ID NO: 848 - RNA, 19 nt, synthetic construct
  source 1..19: mol_type = other RNA
tctctctgtgaagatgaac

SEQ ID NO: 849 - RNA, 19 nt, synthetic construct
  source 1..19: mol_type = other RNA
ctctctgtgaagatgaacc

SEQ ID NO: 850 - RNA, 19 nt, synthetic construct
  source 1..19: mol_type = other RNA
tctctgtgaagatgaacct

SEQ ID NO: 851 - RNA, 19 nt, synthetic construct
  source 1..19: mol_type = other RNA
ctctgtgaagatgaaccta

SEQ ID NO: 852 - RNA, 19 nt, synthetic construct
  source 1..19: mol_type = other RNA
tctgtgaagatgaacctag

SEQ ID NO: 853 - RNA, 19 nt, synthetic construct
  source 1..19: mol_type = other RNA
ctgtgaagatgaacctagt

SEQ ID NO: 854 - RNA, 19 nt, synthetic construct
  source 1..19: mol_type = other RNA
tgtgaagatgaacctagtt

SEQ ID NO: 855 - RNA, 19 nt, synthetic construct
  source 1..19: mol_type = other RNA
gtgaagatgaacctagttc

SEQ ID NO: 856 - RNA, 19 nt, synthetic construct
  source 1..19: mol_type = other RNA
tgaagatgaacctagttct

SEQ ID NO: 857 - RNA, 19 nt, synthetic construct
  source 1..19: mol_type = other RNA
gaagatgaacctagttctt

SEQ ID NO: 858 - RNA, 19 nt, synthetic construct
  source 1..19: mol_type = other RNA
aagatgaacctagttcttc

SEQ ID NO: 859 - RNA, 19 nt, synthetic construct
  source 1..19: mol_type = other RNA
agatgaacctagttcttct

SEQ ID NO: 860 - RNA, 19 nt, synthetic construct
  source 1..19: mol_type = other RNA
gatgaacctagttcttctg

SEQ ID NO: 861 - RNA, 19 nt, synthetic construct
  source 1..19: mol_type = other RNA
atgaacctagttcttctgg

SEQ ID NO: 862 - RNA, 19 nt, synthetic construct
  source 1..19: mol_type = other RNA
tgaacctagttcttctggt

SEQ ID NO: 863 - RNA, 19 nt, synthetic construct
  source 1..19: mol_type = other RNA
gaacctagttcttctggtg

SEQ ID NO: 864 - RNA, 19 nt, synthetic construct
  source 1..19: mol_type = other RNA
aacctagttcttctggtga

SEQ ID NO: 865 - RNA, 19 nt, synthetic construct
  source 1..19: mol_type = other RNA
acctagttcttctggtgaa

SEQ ID NO: 866 - RNA, 19 nt, synthetic construct
  source 1..19: mol_type = other RNA
cctagttcttctggtgaat

SEQ ID NO: 867 - RNA, 19 nt, synthetic construct
  source 1..19: mol_type = other RNA
ctagttcttctggtgaatt

SEQ ID NO: 868 - RNA, 19 nt, synthetic construct
  source 1..19: mol_type = other RNA
tagttcttctggtgaatta

SEQ ID NO: 869 - RNA, 19 nt, synthetic construct
  source 1..19: mol_type = other RNA
agttcttctggtgaattaa

SEQ ID NO: 870 - RNA, 19 nt, synthetic construct
  source 1..19: mol_type = other RNA
gttcttctggtgaattaaa

SEQ ID NO: 871 - RNA, 19 nt, synthetic construct
  source 1..19: mol_type = other RNA
ttcttctggtgaattaaac

SEQ ID NO: 872 - RNA, 19 nt, synthetic construct
  source 1..19: mol_type = other RNA
tcttctggtgaattaaact

SEQ ID NO: 873 - RNA, 19 nt, synthetic construct
  source 1..19: mol_type = other RNA
cttctggtgaattaaacta

SEQ ID NO: 874 - RNA, 19 nt, synthetic construct
  source 1..19: mol_type = other RNA
ttctggtgaattaaactac

SEQ ID NO: 875 - RNA, 19 nt, synthetic construct
  source 1..19: mol_type = other RNA
tctggtgaattaaactact

SEQ ID NO: 876 - RNA, 19 nt, synthetic construct
  source 1..19: mol_type = other RNA
ctggtgaattaaactacta

SEQ ID NO: 877 - RNA, 19 nt, synthetic construct
  source 1..19: mol_type = other RNA
tggtgaattaaactactat

SEQ ID NO: 878 - RNA, 19 nt, synthetic construct
  source 1..19: mol_type = other RNA
ggtgaattaaactactatg

SEQ ID NO: 879 - RNA, 19 nt, synthetic construct
  source 1..19: mol_type = other RNA
gtgaattaaactactatga

SEQ ID NO: 880 - RNA, 19 nt, synthetic construct
  source 1..19: mol_type = other RNA
tgaattaaactactatgat

SEQ ID NO: 881 - RNA, 19 nt, synthetic construct
  source 1..19: mol_type = other RNA
gaattaaactactatgatc

SEQ ID NO: 882 - RNA, 19 nt, synthetic construct
  source 1..19: mol_type = other RNA
aattaaactactatgatct

SEQ ID NO: 883 - RNA, 19 nt, synthetic construct
  source 1..19: mol_type = other RNA
attaaactactatgatctt

SEQ ID NO: 884 - RNA, 19 nt, synthetic construct
  source 1..19: mol_type = other RNA
ttaaactactatgatcttg

SEQ ID NO: 885 - RNA, 19 nt, synthetic construct
  source 1..19: mol_type = other RNA
taaactactatgatcttgt

SEQ ID NO: 886 - RNA, 19 nt, synthetic construct
  source 1..19: mol_type = other RNA
aaactactatgatcttgtc

SEQ ID NO: 887 - RNA, 19 nt, synthetic construct
  source 1..19: mol_type = other RNA
aactactatgatcttgtca

SEQ ID NO: 888 - RNA, 19 nt, synthetic construct
  source 1..19: mol_type = other RNA
actactatgatcttgtcag

SEQ ID NO: 889 - RNA, 19 nt, synthetic construct
  source 1..19: mol_type = other RNA
ctactatgatcttgtcaga

SEQ ID NO: 890 - RNA, 19 nt, synthetic construct
  source 1..19: mol_type = other RNA
tactatgatcttgtcagaa

SEQ ID NO: 891 - RNA, 19 nt, synthetic construct
  source 1..19: mol_type = other RNA
actatgatcttgtcagaac

SEQ ID NO: 892 - RNA, 19 nt, synthetic construct
  source 1..19: mol_type = other RNA
ctatgatcttgtcagaact

SEQ ID NO: 893 - RNA, 19 nt, synthetic construct
  source 1..19: mol_type = other RNA
tatgatcttgtcagaactg

SEQ ID NO: 894 - RNA, 19 nt, synthetic construct
  source 1..19: mol_type = other RNA
atgatcttgtcagaactga

SEQ ID NO: 895 - RNA, 19 nt, synthetic construct
  source 1..19: mol_type = other RNA
tgatcttgtcagaactgaa

SEQ ID NO: 896 - RNA, 19 nt, synthetic construct
  source 1..19: mol_type = other RNA
gatcttgtcagaactgaaa

SEQ ID NO: 897 - RNA, 19 nt, synthetic construct
  source 1..19: mol_type = other RNA
atcttgtcagaactgaaat

SEQ ID NO: 898 - RNA, 19 nt, synthetic construct
  source 1..19: mol_type = other RNA
tcttgtcagaactgaaatc

SEQ ID NO: 899 - RNA, 19 nt, synthetic construct
  source 1..19: mol_type = other RNA
cttgtcagaactgaaatcg

SEQ ID NO: 900 - RNA, 19 nt, synthetic construct
  source 1..19: mol_type = other RNA
ttgtcagaactgaaatcgc

SEQ ID NO: 901 - RNA, 19 nt, synthetic construct
  source 1..19: mol_type = other RNA
tgtcagaactgaaatcgca

SEQ ID NO: 902 - RNA, 19 nt, synthetic construct
  source 1..19: mol_type = other RNA
gtcagaactgaaatcgcag

SEQ ID NO: 903 - RNA, 19 nt, synthetic construct
  source 1..19: mol_type = other RNA
tcagaactgaaatcgcaga

SEQ ID NO: 904 - RNA, 19 nt, synthetic construct
  source 1..19: mol_type = other RNA
cagaactgaaatcgcagaa

SEQ ID NO: 905 - RNA, 19 nt, synthetic construct
  source 1..19: mol_type = other RNA
agaactgaaatcgcagaag

SEQ ID NO: 906 - RNA, 19 nt, synthetic construct
  source 1..19: mol_type = other RNA
gaactgaaatcgcagaaga

SEQ ID NO: 907 - RNA, 19 nt, synthetic construct
  source 1..19: mol_type = other RNA
aactgaaatcgcagaagaa

SEQ ID NO: 908 - RNA, 19 nt, synthetic construct
  source 1..19: mol_type = other RNA
actgaaatcgcagaagaaa

SEQ ID NO: 909 - RNA, 19 nt, synthetic construct
  source 1..19: mol_type = other RNA
ctgaaatcgcagaagaaag

SEQ ID NO: 910 - RNA, 19 nt, synthetic construct
  source 1..19: mol_type = other RNA
tgaaatcgcagaagaaaga

SEQ ID NO: 911 - RNA, 19 nt, synthetic construct
  source 1..19: mol_type = other RNA
gaaatcgcagaagaaagac

SEQ ID NO: 912 - RNA, 19 nt, synthetic construct
  source 1..19: mol_type = other RNA
aaatcgcagaagaaagaca

SEQ ID NO: 913 - RNA, 19 nt, synthetic construct
  source 1..19: mol_type = other RNA
aatcgcagaagaaagacag

SEQ ID NO: 914 - RNA, 19 nt, synthetic construct
  source 1..19: mol_type = other RNA
atcgcagaagaaagacagt

SEQ ID NO: 915 - RNA, 19 nt, synthetic construct
  source 1..19: mol_type = other RNA
tcgcagaagaaagacagta

SEQ ID NO: 916 - RNA, 19 nt, synthetic construct
  source 1..19: mol_type = other RNA
cgcagaagaaagacagtat

SEQ ID NO: 917 - RNA, 19 nt, synthetic construct
  source 1..19: mol_type = other RNA
gcagaagaaagacagtatc

SEQ ID NO: 918 - RNA, 19 nt, synthetic construct
  source 1..19: mol_type = other RNA
cagaagaaagacagtatct

SEQ ID NO: 919 - RNA, 19 nt, synthetic construct
  source 1..19: mol_type = other RNA
agaagaaagacagtatcta

SEQ ID NO: 920 - RNA, 19 nt, synthetic construct
  source 1..19: mol_type = other RNA
gaagaaagacagtatctac

SEQ ID NO: 921 - RNA, 19 nt, synthetic construct
  source 1..19: mol_type = other RNA
aagaaagacagtatctacg

SEQ ID NO: 922 - RNA, 19 nt, synthetic construct
  source 1..19: mol_type = other RNA
agaaagacagtatctacgg

SEQ ID NO: 923 - RNA, 19 nt, synthetic construct
  source 1..19: mol_type = other RNA
gaaagacagtatctacggg

SEQ ID NO: 924 - RNA, 19 nt, synthetic construct
  source 1..19: mol_type = other RNA
aaagacagtatctacggga

SEQ ID NO: 925 - RNA, 19 nt, synthetic construct
  source 1..19: mol_type = other RNA
aagacagtatctacgggaa

SEQ ID NO: 926 - RNA, 19 nt, synthetic construct
  source 1..19: mol_type = other RNA
agacagtatctacgggaat

SEQ ID NO: 927 - RNA, 19 nt, synthetic construct
  source 1..19: mol_type = other RNA
gacagtatctacgggaatt

SEQ ID NO: 928 - RNA, 19 nt, synthetic construct
  source 1..19: mol_type = other RNA
acagtatctacgggaatta

SEQ ID NO: 929 - RNA, 19 nt, synthetic construct
  source 1..19: mol_type = other RNA
cagtatctacgggaattaa

SEQ ID NO: 930 - RNA, 19 nt, synthetic construct
  source 1..19: mol_type = other RNA
agtatctacgggaattaaa

SEQ ID NO: 931 - RNA, 19 nt, synthetic construct
  source 1..19: mol_type = other RNA
gtatctacgggaattaaat

SEQ ID NO: 932 - RNA, 19 nt, synthetic construct
  source 1..19: mol_type = other RNA
tatctacgggaattaaata

SEQ ID NO: 933 - RNA, 19 nt, synthetic construct
  source 1..19: mol_type = other RNA
atctacgggaattaaatat

SEQ ID NO: 934 - RNA, 19 nt, synthetic construct
  source 1..19: mol_type = other RNA
tctacgggaattaaatatg

SEQ ID NO: 935 - RNA, 19 nt, synthetic construct
  source 1..19: mol_type = other RNA
ctacgggaattaaatatga

SEQ ID NO: 936 - RNA, 19 nt, synthetic construct
  source 1..19: mol_type = other RNA
tacgggaattaaatatgat

SEQ ID NO: 937 - RNA, 19 nt, synthetic construct
  source 1..19: mol_type = other RNA
acgggaattaaatatgatc

SEQ ID NO: 938 - RNA, 19 nt, synthetic construct
  source 1..19: mol_type = other RNA
cgggaattaaatatgatca

SEQ ID NO: 939 - RNA, 19 nt, synthetic construct
  source 1..19: mol_type = other RNA
gggaattaaatatgatcat

SEQ ID NO: 940 - RNA, 19 nt, synthetic construct
  source 1..19: mol_type = other RNA
ggaattaaatatgatcata

SEQ ID NO: 941 - RNA, 19 nt, synthetic construct
  source 1..19: mol_type = other RNA
gaattaaatatgatcataa

SEQ ID NO: 942 - RNA, 19 nt, synthetic construct
  source 1..19: mol_type = other RNA
aattaaatatgatcataaa

SEQ ID NO: 943 - RNA, 19 nt, synthetic construct
  source 1..19: mol_type = other RNA
attaaatatgatcataaaa

SEQ ID NO: 944 - RNA, 19 nt, synthetic construct
  source 1..19: mol_type = other RNA
ttaaatatgatcataaaag

SEQ ID NO: 945 - RNA, 19 nt, synthetic construct
  source 1..19: mol_type = other RNA
taaatatgatcataaaagt

SEQ ID NO: 946 - RNA, 19 nt, synthetic construct
  source 1..19: mol_type = other RNA
aaatatgatcataaaagtg

SEQ ID NO: 947 - RNA, 19 nt, synthetic construct
  source 1..19: mol_type = other RNA
aatatgatcataaaagtgt

SEQ ID NO: 948 - RNA, 19 nt, synthetic construct
  source 1..19: mol_type = other RNA
atatgatcataaaagtgtt

SEQ ID NO: 949 - RNA, 19 nt, synthetic construct
  source 1..19: mol_type = other RNA
tatgatcataaaagtgttt

SEQ ID NO: 950 - RNA, 19 nt, synthetic construct
  source 1..19: mol_type = other RNA
atgatcataaaagtgtttc

SEQ ID NO: 951 - RNA, 19 nt, synthetic construct
  source 1..19: mol_type = other RNA
tgatcataaaagtgtttcg

SEQ ID NO: 952 - RNA, 19 nt, synthetic construct
  source 1..19: mol_type = other RNA
gatcataaaagtgtttcga

SEQ ID NO: 953 - RNA, 19 nt, synthetic construct
  source 1..19: mol_type = other RNA
atcataaaagtgtttcgag

SEQ ID NO: 954 - RNA, 19 nt, synthetic construct
  source 1..19: mol_type = other RNA
tcataaaagtgtttcgaga

SEQ ID NO: 955 - RNA, 19 nt, synthetic construct
  source 1..19: mol_type = other RNA
cataaaagtgtttcgagaa

SEQ ID NO: 956 - RNA, 19 nt, synthetic construct
  source 1..19: mol_type = other RNA
ataaaagtgtttcgagaag

SEQ ID NO: 957 - RNA, 19 nt, synthetic construct
  source 1..19: mol_type = other RNA
taaaagtgtttcgagaagc

SEQ ID NO: 958 - RNA, 19 nt, synthetic construct
  source 1..19: mol_type = other RNA
aaaagtgtttcgagaagcc

SEQ ID NO: 959 - RNA, 19 nt, synthetic construct
  source 1..19: mol_type = other RNA
aaagtgtttcgagaagcct

SEQ ID NO: 960 - RNA, 19 nt, synthetic construct
  source 1..19: mol_type = other RNA
aagtgtttcgagaagcctt

SEQ ID NO: 961 - RNA, 19 nt, synthetic construct
  source 1..19: mol_type = other RNA
agtgtttcgagaagccttt

SEQ ID NO: 962 - RNA, 19 nt, synthetic construct
  source 1..19: mol_type = other RNA
gtgtttcgagaagcctttc

SEQ ID NO: 963 - RNA, 19 nt, synthetic construct
  source 1..19: mol_type = other RNA
tgtttcgagaagcctttct

SEQ ID NO: 964 - RNA, 19 nt, synthetic construct
  source 1..19: mol_type = other RNA
gtttcgagaagcctttctt

SEQ ID NO: 965 - RNA, 19 nt, synthetic construct
  source 1..19: mol_type = other RNA
tttcgagaagcctttcttt

SEQ ID NO: 966 - RNA, 19 nt, synthetic construct
  source 1..19: mol_type = other RNA
ttcgagaagcctttctttc

SEQ ID NO: 967 - RNA, 19 nt, synthetic construct
  source 1..19: mol_type = other RNA
tcgagaagcctttctttct

SEQ ID NO: 968 - RNA, 19 nt, synthetic construct
  source 1..19: mol_type = other RNA
cgagaagcctttctttctg

SEQ ID NO: 969 - RNA, 19 nt, synthetic construct
  source 1..19: mol_type = other RNA
gagaagcctttctttctga

SEQ ID NO: 970 - RNA, 19 nt, synthetic construct
  source 1..19: mol_type = other RNA
agaagcctttctttctgat

SEQ ID NO: 971 - RNA, 19 nt, synthetic construct
  source 1..19: mol_type = other RNA
gaagcctttctttctgata

SEQ ID NO: 972 - RNA, 19 nt, synthetic construct
  source 1..19: mol_type = other RNA
aagcctttctttctgatag

SEQ ID NO: 973 - RNA, 19 nt, synthetic construct
  source 1..19: mol_type = other RNA
agcctttctttctgataga

SEQ ID NO: 974 - RNA, 19 nt, synthetic construct
  source 1..19: mol_type = other RNA
gcctttctttctgatagaa

SEQ ID NO: 975 - RNA, 19 nt, synthetic construct
  source 1..19: mol_type = other RNA
cctttctttctgatagaaa

SEQ ID NO: 976 - RNA, 19 nt, synthetic construct
  source 1..19: mol_type = other RNA
ctttctttctgatagaaag

SEQ ID NO: 977 - RNA, 19 nt, synthetic construct
  source 1..19: mol_type = other RNA
tttctttctgatagaaagc

SEQ ID NO: 978 - RNA, 19 nt, synthetic construct
  source 1..19: mol_type = other RNA
ttctttctgatagaaagct

SEQ ID NO: 979 - RNA, 19 nt, synthetic construct
  source 1..19: mol_type = other RNA
tctttctgatagaaagctg

SEQ ID NO: 980 - RNA, 19 nt, synthetic construct
  source 1..19: mol_type = other RNA
ctttctgatagaaagctgt

SEQ ID NO: 981 - RNA, 19 nt, synthetic construct
  source 1..19: mol_type = other RNA
tttctgatagaaagctgtt

SEQ ID NO: 982 - RNA, 19 nt, synthetic construct
  source 1..19: mol_type = other RNA
ttctgatagaaagctgttt

SEQ ID NO: 983 - RNA, 19 nt, synthetic construct
  source 1..19: mol_type = other RNA
tctgatagaaagctgttta

SEQ ID NO: 984 - RNA, 19 nt, synthetic construct
  source 1..19: mol_type = other RNA
ctgatagaaagctgtttaa

SEQ ID NO: 985 - RNA, 19 nt, synthetic construct
  source 1..19: mol_type = other RNA
tgatagaaagctgtttaaa

SEQ ID NO: 986 - RNA, 19 nt, synthetic construct
  source 1..19: mol_type = other RNA
gatagaaagctgtttaaac

SEQ ID NO: 987 - RNA, 19 nt, synthetic construct
  source 1..19: mol_type = other RNA
atagaaagctgtttaaacc

SEQ ID NO: 988 - RNA, 19 nt, synthetic construct
  source 1..19: mol_type = other RNA
tagaaagctgtttaaacct

SEQ ID NO: 989 - RNA, 19 nt, synthetic construct
  source 1..19: mol_type = other RNA
agaaagctgtttaaacctt

SEQ ID NO: 990 - RNA, 19 nt, synthetic construct
  source 1..19: mol_type = other RNA
gaaagctgtttaaaccttc

SEQ ID NO: 991 - RNA, 19 nt, synthetic construct
  source 1..19: mol_type = other RNA
aaagctgtttaaaccttct

SEQ ID NO: 992 - RNA, 19 nt, synthetic construct
  source 1..19: mol_type = other RNA
aagctgtttaaaccttctg

SEQ ID NO: 993 - RNA, 19 nt, synthetic construct
  source 1..19: mol_type = other RNA
agctgtttaaaccttctga

SEQ ID NO: 994 - RNA, 19 nt, synthetic construct
  source 1..19: mol_type = other RNA
gctgtttaaaccttctgat

SEQ ID NO: 995 - RNA, 19 nt, synthetic construct
  source 1..19: mol_type = other RNA
ctgtttaaaccttctgata

SEQ ID NO: 996 - RNA, 19 nt, synthetic construct
  source 1..19: mol_type = other RNA
tgtttaaaccttctgatat

SEQ ID NO: 997 - RNA, 19 nt, synthetic construct
  source 1..19: mol_type = other RNA
gtttaaaccttctgatatc

SEQ ID NO: 998 - RNA, 19 nt, synthetic construct
  source 1..19: mol_type = other RNA
tttaaaccttctgatatcg

SEQ ID NO: 999 - RNA, 19 nt, synthetic construct
  source 1..19: mol_type = other RNA
ttaaaccttctgatatcga

SEQ ID NO: 1000 - RNA, 19 nt, synthetic construct
  source 1..19: mol_type = other RNA
taaaccttctgatatcgaa

SEQ ID NO: 1001 - RNA, 19 nt, synthetic construct
  source 1..19: mol_type = other RNA
aaaccttctgatatcgaaa

SEQ ID NO: 1002 - RNA, 19 nt, synthetic construct
  source 1..19: mol_type = other RNA
aaccttctgatatcgaaaa

SEQ ID NO: 1003 - RNA, 19 nt, synthetic construct
  source 1..19: mol_type = other RNA
accttctgatatcgaaaag

SEQ ID NO: 1004 - RNA, 19 nt, synthetic construct
  source 1..19: mol_type = other RNA
ccttctgatatcgaaaaga

SEQ ID NO: 1005 - RNA, 19 nt, synthetic construct
  source 1..19: mol_type = other RNA
cttctgatatcgaaaagat

SEQ ID NO: 1006 - RNA, 19 nt, synthetic construct
  source 1..19: mol_type = other RNA
ttctgatatcgaaaagatt

SEQ ID NO: 1007 - RNA, 19 nt, synthetic construct
  source 1..19: mol_type = other RNA
tctgatatcgaaaagattt

SEQ ID NO: 1008 - RNA, 19 nt, synthetic construct
  source 1..19: mol_type = other RNA
ctgatatcgaaaagatttt

SEQ ID NO: 1009 - RNA, 19 nt, synthetic construct
  source 1..19: mol_type = other RNA
tgatatcgaaaagattttt

SEQ ID NO: 1010 - RNA, 19 nt, synthetic construct
  source 1..19: mol_type = other RNA
gatatcgaaaagattttta

SEQ ID NO: 1011 - RNA, 19 nt, synthetic construct
  source 1..19: mol_type = other RNA
atatcgaaaagatttttag

SEQ ID NO: 1012 - RNA, 19 nt, synthetic construct
  source 1..19: mol_type = other RNA
tatcgaaaagatttttagt

SEQ ID NO: 1013 - RNA, 19 nt, synthetic construct
  source 1..19: mol_type = other RNA
atcgaaaagatttttagta

SEQ ID NO: 1014 - RNA, 19 nt, synthetic construct
  source 1..19: mol_type = other RNA
tcgaaaagatttttagtaa

SEQ ID NO: 1015 - RNA, 19 nt, synthetic construct
  source 1..19: mol_type = other RNA
cgaaaagatttttagtaac

SEQ ID NO: 1016 - RNA, 19 nt, synthetic construct
  source 1..19: mol_type = other RNA
gaaaagatttttagtaaca

SEQ ID NO: 1017 - RNA, 19 nt, synthetic construct
  source 1..19: mol_type = other RNA
aaaagatttttagtaacat

SEQ ID NO: 1018 - RNA, 19 nt, synthetic construct
  source 1..19: mol_type = other RNA
aaagatttttagtaacatt

SEQ ID NO: 1019 - RNA, 19 nt, synthetic construct
  source 1..19: mol_type = other RNA
aagatttttagtaacattt

SEQ ID NO: 1020 - RNA, 19 nt, synthetic construct
  source 1..19: mol_type = other RNA
agatttttagtaacatttc

SEQ ID NO: 1021 - RNA, 19 nt, synthetic construct
  source 1..19: mol_type = other RNA
gatttttagtaacatttca

SEQ ID NO: 1022 - RNA, 19 nt, synthetic construct
  source 1..19: mol_type = other RNA
atttttagtaacatttcag

SEQ ID NO: 1023 - RNA, 19 nt, synthetic construct
  source 1..19: mol_type = other RNA
tttttagtaacatttcaga

SEQ ID NO: 1024 - RNA, 19 nt, synthetic construct
  source 1..19: mol_type = other RNA
ttttagtaacatttcagat

SEQ ID NO: 1025 - RNA, 19 nt, synthetic construct
  source 1..19: mol_type = other RNA
tttagtaacatttcagata

SEQ ID NO: 1026 - RNA, 19 nt, synthetic construct
  source 1..19: mol_type = other RNA
ttagtaacatttcagatat

SEQ ID NO: 1027 - RNA, 19 nt, synthetic construct
  source 1..19: mol_type = other RNA
tagtaacatttcagatata

SEQ ID NO: 1028 - RNA, 19 nt, synthetic construct
  source 1..19: mol_type = other RNA
agtaacatttcagatatac

SEQ ID NO: 1029 - RNA, 19 nt, synthetic construct
  source 1..19: mol_type = other RNA
gtaacatttcagatataca

SEQ ID NO: 1030 - RNA, 19 nt, synthetic construct
  source 1..19: mol_type = other RNA
taacatttcagatatacat

SEQ ID NO: 1031 - RNA, 19 nt, synthetic construct
  source 1..19: mol_type = other RNA
aacatttcagatatacatg

SEQ ID NO: 1032 - RNA, 19 nt, synthetic construct
  source 1..19: mol_type = other RNA
acatttcagatatacatga

SEQ ID NO: 1033 - RNA, 19 nt, synthetic construct
  source 1..19: mol_type = other RNA
catttcagatatacatgaa

SEQ ID NO: 1034 - RNA, 19 nt, synthetic construct
  source 1..19: mol_type = other RNA
atttcagatatacatgaat

SEQ ID NO: 1035 - RNA, 19 nt, synthetic construct
  source 1..19: mol_type = other RNA
tttcagatatacatgaatt

SEQ ID NO: 1036 - RNA, 19 nt, synthetic construct
  source 1..19: mol_type = other RNA
ttcagatatacatgaattg

SEQ ID NO: 1037 - RNA, 19 nt, synthetic construct
  source 1..19: mol_type = other RNA
tcagatatacatgaattga

SEQ ID NO: 1038 - RNA, 19 nt, synthetic construct
  source 1..19: mol_type = other RNA
cagatatacatgaattgac

SEQ ID NO: 1039 - RNA, 19 nt, synthetic construct
  source 1..19: mol_type = other RNA
agatatacatgaattgact

SEQ ID NO: 1040 - RNA, 19 nt, synthetic construct
  source 1..19: mol_type = other RNA
gatatacatgaattgactg

SEQ ID NO: 1041 - RNA, 19 nt, synthetic construct
  source 1..19: mol_type = other RNA
atatacatgaattgactgt

SEQ ID NO: 1042 - RNA, 19 nt, synthetic construct
  source 1..19: mol_type = other RNA
tatacatgaattgactgtg

SEQ ID NO: 1043 - RNA, 19 nt, synthetic construct
  source 1..19: mol_type = other RNA
atacatgaattgactgtga

SEQ ID NO: 1044 - RNA, 19 nt, synthetic construct
  source 1..19: mol_type = other RNA
tacatgaattgactgtgaa

SEQ ID NO: 1045 - RNA, 19 nt, synthetic construct
  source 1..19: mol_type = other RNA
acatgaattgactgtgaaa

SEQ ID NO: 1046 - RNA, 19 nt, synthetic construct
  source 1..19: mol_type = other RNA
catgaattgactgtgaaac

SEQ ID NO: 1047 - RNA, 19 nt, synthetic construct
  source 1..19: mol_type = other RNA
atgaattgactgtgaaact

SEQ ID NO: 1048 - RNA, 19 nt, synthetic construct
  source 1..19: mol_type = other RNA
tgaattgactgtgaaactt

SEQ ID NO: 1049 - RNA, 19 nt, synthetic construct
  source 1..19: mol_type = other RNA
gaattgactgtgaaacttt

SEQ ID NO: 1050 - RNA, 19 nt, synthetic construct
  source 1..19: mol_type = other RNA
aattgactgtgaaactttt

SEQ ID NO: 1051 - RNA, 19 nt, synthetic construct
  source 1..19: mol_type = other RNA
attgactgtgaaactttta

SEQ ID NO: 1052 - RNA, 19 nt, synthetic construct
  source 1..19: mol_type = other RNA
ttgactgtgaaacttttag

SEQ ID NO: 1053 - RNA, 19 nt, synthetic construct
  source 1..19: mol_type = other RNA
tgactgtgaaacttttagg

SEQ ID NO: 1054 - RNA, 19 nt, synthetic construct
  source 1..19: mol_type = other RNA
gactgtgaaacttttaggt

SEQ ID NO: 1055 - RNA, 19 nt, synthetic construct
  source 1..19: mol_type = other RNA
actgtgaaacttttaggtt

SEQ ID NO: 1056 - RNA, 19 nt, synthetic construct
  source 1..19: mol_type = other RNA
ctgtgaaacttttaggttt

SEQ ID NO: 1057 - RNA, 19 nt, synthetic construct
  source 1..19: mol_type = other RNA
tgtgaaacttttaggtttg

SEQ ID NO: 1058 - RNA, 19 nt, synthetic construct
  source 1..19: mol_type = other RNA
gtgaaacttttaggtttga

SEQ ID NO: 1059 - RNA, 19 nt, synthetic construct
  source 1..19: mol_type = other RNA
tgaaacttttaggtttgat

SEQ ID NO: 1060 - RNA, 19 nt, synthetic construct
  source 1..19: mol_type = other RNA
gaaacttttaggtttgatt

SEQ ID NO: 1061 - RNA, 19 nt, synthetic construct
  source 1..19: mol_type = other RNA
aaacttttaggtttgattg

SEQ ID NO: 1062 - RNA, 19 nt, synthetic construct
  source 1..19: mol_type = other RNA
aacttttaggtttgattga

SEQ ID NO: 1063 - RNA, 19 nt, synthetic construct
  source 1..19: mol_type = other RNA
acttttaggtttgattgaa

SEQ ID NO: 1064 - RNA, 19 nt, synthetic construct
  source 1..19: mol_type = other RNA
cttttaggtttgattgaag

SEQ ID NO: 1065 - RNA, 19 nt, synthetic construct
  source 1..19: mol_type = other RNA
ttttaggtttgattgaaga

SEQ ID NO: 1066 - RNA, 19 nt, synthetic construct
  source 1..19: mol_type = other RNA
tttaggtttgattgaagac

SEQ ID NO: 1067 - RNA, 19 nt, synthetic construct
  source 1..19: mol_type = other RNA
ttaggtttgattgaagaca

SEQ ID NO: 1068 - RNA, 19 nt, synthetic construct
  source 1..19: mol_type = other RNA
taggtttgattgaagacac

SEQ ID NO: 1069 - RNA, 19 nt, synthetic construct
  source 1..19: mol_type = other RNA
aggtttgattgaagacaca

SEQ ID NO: 1070 - RNA, 19 nt, synthetic construct
  source 1..19: mol_type = other RNA
ggtttgattgaagacacag

SEQ ID NO: 1071 - RNA, 19 nt, synthetic construct
  source 1..19: mol_type = other RNA
gtttgattgaagacacagt

SEQ ID NO: 1072 - RNA, 19 nt, synthetic construct
  source 1..19: mol_type = other RNA
tttgattgaagacacagtt

SEQ ID NO: 1073 - RNA, 19 nt, synthetic construct
  source 1..19: mol_type = other RNA
ttgattgaagacacagttg

SEQ ID NO: 1074 - RNA, 19 nt, synthetic construct
  source 1..19: mol_type = other RNA
tgattgaagacacagttga

SEQ ID NO: 1075 - RNA, 19 nt, synthetic construct
  source 1..19: mol_type = other RNA
gattgaagacacagttgaa

SEQ ID NO: 1076 - RNA, 19 nt, synthetic construct
  source 1..19: mol_type = other RNA
attgaagacacagttgaaa

SEQ ID NO: 1077 - RNA, 19 nt, synthetic construct
  source 1..19: mol_type = other RNA
ttgaagacacagttgaaat

SEQ ID NO: 1078 - RNA, 19 nt, synthetic construct
  source 1..19: mol_type = other RNA
tgaagacacagttgaaatg

SEQ ID NO: 1079 - RNA, 19 nt, synthetic construct
  source 1..19: mol_type = other RNA
gaagacacagttgaaatga

SEQ ID NO: 1080 - RNA, 19 nt, synthetic construct
  source 1..19: mol_type = other RNA
aagacacagttgaaatgac

SEQ ID NO: 1081 - RNA, 19 nt, synthetic construct
  source 1..19: mol_type = other RNA
agacacagttgaaatgact

SEQ ID NO: 1082 - RNA, 19 nt, synthetic construct
  source 1..19: mol_type = other RNA
gacacagttgaaatgactg

SEQ ID NO: 1083 - RNA, 19 nt, synthetic construct
  source 1..19: mol_type = other RNA
acacagttgaaatgactga

SEQ ID NO: 1084 - RNA, 19 nt, synthetic construct
  source 1..19: mol_type = other RNA
cacagttgaaatgactgat

SEQ ID NO: 1085 - RNA, 19 nt, synthetic construct
  source 1..19: mol_type = other RNA
acagttgaaatgactgatg

SEQ ID NO: 1086 - RNA, 19 nt, synthetic construct
  source 1..19: mol_type = other RNA
cagttgaaatgactgatga

SEQ ID NO: 1087 - RNA, 19 nt, synthetic construct
  source 1..19: mol_type = other RNA
agttgaaatgactgatgaa

SEQ ID NO: 1088 - RNA, 19 nt, synthetic construct
  source 1..19: mol_type = other RNA
gttgaaatgactgatgaaa

SEQ ID NO: 1089 - RNA, 19 nt, synthetic construct
  source 1..19: mol_type = other RNA
ttgaaatgactgatgaaag

SEQ ID NO: 1090 - RNA, 19 nt, synthetic construct
  source 1..19: mol_type = other RNA
tgaaatgactgatgaaagc

SEQ ID NO: 1091 - RNA, 19 nt, synthetic construct
  source 1..19: mol_type = other RNA
gaaatgactgatgaaagca

SEQ ID NO: 1092 - RNA, 19 nt, synthetic construct
  source 1..19: mol_type = other RNA
aaatgactgatgaaagcag

SEQ ID NO: 1093 - RNA, 19 nt, synthetic construct
  source 1..19: mol_type = other RNA
aatgactgatgaaagcagt

SEQ ID NO: 1094 - RNA, 19 nt, synthetic construct
  source 1..19: mol_type = other RNA
atgactgatgaaagcagtc

SEQ ID NO: 1095 - RNA, 19 nt, synthetic construct
  source 1..19: mol_type = other RNA
tgactgatgaaagcagtcc

SEQ ID NO: 1096 - RNA, 19 nt, synthetic construct
  source 1..19: mol_type = other RNA
gactgatgaaagcagtcct

SEQ ID NO: 1097 - RNA, 19 nt, synthetic construct
  source 1..19: mol_type = other RNA
actgatgaaagcagtcctc

SEQ ID NO: 1098 - RNA, 19 nt, synthetic construct
  source 1..19: mol_type = other RNA
ctgatgaaagcagtcctca

SEQ ID NO: 1099 - RNA, 19 nt, synthetic construct
  source 1..19: mol_type = other RNA
tgatgaaagcagtcctcat

SEQ ID NO: 1100 - RNA, 19 nt, synthetic construct
  source 1..19: mol_type = other RNA
gatgaaagcagtcctcatc

SEQ ID NO: 1101 - RNA, 19 nt, synthetic construct
  source 1..19: mol_type = other RNA
atgaaagcagtcctcatcc

SEQ ID NO: 1102 - RNA, 19 nt, synthetic construct
  source 1..19: mol_type = other RNA
tgaaagcagtcctcatccc

SEQ ID NO: 1103 - RNA, 19 nt, synthetic construct
  source 1..19: mol_type = other RNA
gaaagcagtcctcatccct

SEQ ID NO: 1104 - RNA, 19 nt, synthetic construct
  source 1..19: mol_type = other RNA
aaagcagtcctcatccctt

SEQ ID NO: 1105 - RNA, 19 nt, synthetic construct
  source 1..19: mol_type = other RNA
aagcagtcctcatccctta

SEQ ID NO: 1106 - RNA, 19 nt, synthetic construct
  source 1..19: mol_type = other RNA
agcagtcctcatcccttag

SEQ ID NO: 1107 - RNA, 19 nt, synthetic construct
  source 1..19: mol_type = other RNA
gcagtcctcatcccttagc

SEQ ID NO: 1108 - RNA, 19 nt, synthetic construct
  source 1..19: mol_type = other RNA
cagtcctcatcccttagct

SEQ ID NO: 1109 - RNA, 19 nt, synthetic construct
  source 1..19: mol_type = other RNA
agtcctcatcccttagctg

SEQ ID NO: 1110 - RNA, 19 nt, synthetic construct
  source 1..19: mol_type = other RNA
gtcctcatcccttagctgg

SEQ ID NO: 1111 - RNA, 19 nt, synthetic construct
  source 1..19: mol_type = other RNA
tcctcatcccttagctggc

SEQ ID NO: 1112 - RNA, 19 nt, synthetic construct
  source 1..19: mol_type = other RNA
cctcatcccttagctggca

SEQ ID NO: 1113 - RNA, 19 nt, synthetic construct
  source 1..19: mol_type = other RNA
ctcatcccttagctggcag

SEQ ID NO: 1114 - RNA, 19 nt, synthetic construct
  source 1..19: mol_type = other RNA
tcatcccttagctggcagc

SEQ ID NO: 1115 - RNA, 19 nt, synthetic construct
  source 1..19: mol_type = other RNA
catcccttagctggcagct

SEQ ID NO: 1116 - RNA, 19 nt, synthetic construct
  source 1..19: mol_type = other RNA
atcccttagctggcagctg

SEQ ID NO: 1117 - RNA, 19 nt, synthetic construct
  source 1..19: mol_type = other RNA
tcccttagctggcagctgt

SEQ ID NO: 1118 - RNA, 19 nt, synthetic construct
  source 1..19: mol_type = other RNA
cccttagctggcagctgtt

SEQ ID NO: 1119 - RNA, 19 nt, synthetic construct
  source 1..19: mol_type = other RNA
ccttagctggcagctgttt

SEQ ID NO: 1120 - RNA, 19 nt, synthetic construct
  source 1..19: mol_type = other RNA
cttagctggcagctgtttt

SEQ ID NO: 1121 - RNA, 19 nt, synthetic construct
  source 1..19: mol_type = other RNA
ttagctggcagctgttttg

SEQ ID NO: 1122 - RNA, 19 nt, synthetic construct
  source 1..19: mol_type = other RNA
tagctggcagctgttttga

SEQ ID NO: 1123 - RNA, 19 nt, synthetic construct
  source 1..19: mol_type = other RNA
agctggcagctgttttgaa

SEQ ID NO: 1124 - RNA, 19 nt, synthetic construct
  source 1..19: mol_type = other RNA
gctggcagctgttttgaag

SEQ ID NO: 1125 - RNA, 19 nt, synthetic construct
  source 1..19: mol_type = other RNA
ctggcagctgttttgaaga

SEQ ID NO: 1126 - RNA, 19 nt, synthetic construct
  source 1..19: mol_type = other RNA
tggcagctgttttgaagat

SEQ ID NO: 1127 - RNA, 19 nt, synthetic construct
  source 1..19: mol_type = other RNA
ggcagctgttttgaagatt

SEQ ID NO: 1128 - RNA, 19 nt, synthetic construct
  source 1..19: mol_type = other RNA
gcagctgttttgaagattt

SEQ ID NO: 1129 - RNA, 19 nt, synthetic construct
  source 1..19: mol_type = other RNA
cagctgttttgaagatttg

SEQ ID NO: 1130 - RNA, 19 nt, synthetic construct
  source 1..19: mol_type = other RNA
agctgttttgaagatttgg

SEQ ID NO: 1131 - RNA, 19 nt, synthetic construct
  source 1..19: mol_type = other RNA
gctgttttgaagatttggc

SEQ ID NO: 1132 - RNA, 19 nt, synthetic construct
  source 1..19: mol_type = other RNA
ctgttttgaagatttggca

SEQ ID NO: 1133 - RNA, 19 nt, synthetic construct
  source 1..19: mol_type = other RNA
tgttttgaagatttggcag

SEQ ID NO: 1134 - RNA, 19 nt, synthetic construct
  source 1..19: mol_type = other RNA
gttttgaagatttggcaga

SEQ ID NO: 1135 - RNA, 19 nt, synthetic construct
  source 1..19: mol_type = other RNA
ttttgaagatttggcagaa

SEQ ID NO: 1136 - RNA, 19 nt, synthetic construct
  source 1..19: mol_type = other RNA
tttgaagatttggcagaag

SEQ ID NO: 1137 - RNA, 19 nt, synthetic construct
  source 1..19: mol_type = other RNA
ttgaagatttggcagaaga

SEQ ID NO: 1138 - RNA, 19 nt, synthetic construct
  source 1..19: mol_type = other RNA
tgaagatttggcagaagag

SEQ ID NO: 1139 - RNA, 19 nt, synthetic construct
  source 1..19: mol_type = other RNA
gaagatttggcagaagagc

SEQ ID NO: 1140 - RNA, 19 nt, synthetic construct
  source 1..19: mol_type = other RNA
aagatttggcagaagagca

SEQ ID NO: 1141 - RNA, 19 nt, synthetic construct
  source 1..19: mol_type = other RNA
agatttggcagaagagcaa

SEQ ID NO: 1142 - RNA, 19 nt, synthetic construct
  source 1..19: mol_type = other RNA
gatttggcagaagagcaag

SEQ ID NO: 1143 - RNA, 19 nt, synthetic construct
  source 1..19: mol_type = other RNA
atttggcagaagagcaagc

SEQ ID NO: 1144 - RNA, 19 nt, synthetic construct
  source 1..19: mol_type = other RNA
tttggcagaagagcaagca

SEQ ID NO: 1145 - RNA, 19 nt, synthetic construct
  source 1..19: mol_type = other RNA
ttggcagaagagcaagcat

SEQ ID NO: 1146 - RNA, 19 nt, synthetic construct
  source 1..19: mol_type = other RNA
tggcagaagagcaagcatt

SEQ ID NO: 1147 - RNA, 19 nt, synthetic construct
  source 1..19: mol_type = other RNA
ggcagaagagcaagcattt

SEQ ID NO: 1148 - RNA, 19 nt, synthetic construct
  source 1..19: mol_type = other RNA
gcagaagagcaagcatttg

SEQ ID NO: 1149 - RNA, 19 nt, synthetic construct
  source 1..19: mol_type = other RNA
cagaagagcaagcatttga

SEQ ID NO: 1150 - RNA, 19 nt, synthetic construct
  source 1..19: mol_type = other RNA
agaagagcaagcatttgat

SEQ ID NO: 1151 - RNA, 19 nt, synthetic construct
  source 1..19: mol_type = other RNA
gaagagcaagcatttgatc

SEQ ID NO: 1152 - RNA, 19 nt, synthetic construct
  source 1..19: mol_type = other RNA
aagagcaagcatttgatcc

SEQ ID NO: 1153 - RNA, 19 nt, synthetic construct
  source 1..19: mol_type = other RNA
agagcaagcatttgatcct

SEQ ID NO: 1154 - RNA, 19 nt, synthetic construct
  source 1..19: mol_type = other RNA
gagcaagcatttgatcctt

SEQ ID NO: 1155 - RNA, 19 nt, synthetic construct
  source 1..19: mol_type = other RNA
agcaagcatttgatcctta

SEQ ID NO: 1156 - RNA, 19 nt, synthetic construct
  source 1..19: mol_type = other RNA
gcaagcatttgatccttat

SEQ ID NO: 1157 - RNA, 19 nt, synthetic construct
  source 1..19: mol_type = other RNA
caagcatttgatccttatg

SEQ ID NO: 1158 - RNA, 19 nt, synthetic construct
  source 1..19: mol_type = other RNA
aagcatttgatccttatga

SEQ ID NO: 1159 - RNA, 19 nt, synthetic construct
  source 1..19: mol_type = other RNA
agcatttgatccttatgaa

SEQ ID NO: 1160 - RNA, 19 nt, synthetic construct
  source 1..19: mol_type = other RNA
gcatttgatccttatgaaa

SEQ ID NO: 1161 - RNA, 19 nt, synthetic construct
  source 1..19: mol_type = other RNA
catttgatccttatgaaac

SEQ ID NO: 1162 - RNA, 19 nt, synthetic construct
  source 1..19: mol_type = other RNA
atttgatccttatgaaaca

SEQ ID NO: 1163 - RNA, 19 nt, synthetic construct
  source 1..19: mol_type = other RNA
tttgatccttatgaaacat

SEQ ID NO: 1164 - RNA, 19 nt, synthetic construct
  source 1..19: mol_type = other RNA
ttgatccttatgaaacatt

SEQ ID NO: 1165 - RNA, 19 nt, synthetic construct
  source 1..19: mol_type = other RNA
tgatccttatgaaacatta

SEQ ID NO: 1166 - RNA, 19 nt, synthetic construct
  source 1..19: mol_type = other RNA
gatccttatgaaacattat

SEQ ID NO: 1167 - RNA, 19 nt, synthetic construct
  source 1..19: mol_type = other RNA
atccttatgaaacattatc

SEQ ID NO: 1168 - RNA, 19 nt, synthetic construct
  source 1..19: mol_type = other RNA
tccttatgaaacattatca

SEQ ID NO: 1169 - RNA, 19 nt, synthetic construct
  source 1..19: mol_type = other RNA
ccttatgaaacattatcac

SEQ ID NO: 1170 - RNA, 19 nt, synthetic construct
  source 1..19: mol_type = other RNA
cttatgaaacattatcaca

SEQ ID NO: 1171 - RNA, 19 nt, synthetic construct
  source 1..19: mol_type = other RNA
ttatgaaacattatcacag

SEQ ID NO: 1172 - RNA, 19 nt, synthetic construct
  source 1..19: mol_type = other RNA
tatgaaacattatcacagg

SEQ ID NO: 1173 - RNA, 19 nt, synthetic construct
  source 1..19: mol_type = other RNA
atgaaacattatcacagga

SEQ ID NO: 1174 - RNA, 19 nt, synthetic construct
  source 1..19: mol_type = other RNA
tgaaacattatcacaggac

SEQ ID NO: 1175 - RNA, 19 nt, synthetic construct
  source 1..19: mol_type = other RNA
gaaacattatcacaggaca

SEQ ID NO: 1176 - RNA, 19 nt, synthetic construct
  source 1..19: mol_type = other RNA
aaacattatcacaggacat

SEQ ID NO: 1177 - RNA, 19 nt, synthetic construct
  source 1..19: mol_type = other RNA
aacattatcacaggacatt

SEQ ID NO: 1178 - RNA, 19 nt, synthetic construct
  source 1..19: mol_type = other RNA
acattatcacaggacattc

SEQ ID NO: 1179 - RNA, 19 nt, synthetic construct
  source 1..19: mol_type = other RNA
cattatcacaggacattct

SEQ ID NO: 1180 - RNA, 19 nt, synthetic construct
  source 1..19: mol_type = other RNA
attatcacaggacattctt

SEQ ID NO: 1181 - RNA, 19 nt, synthetic construct
  source 1..19: mol_type = other RNA
ttatcacaggacattcttt

SEQ ID NO: 1182 - RNA, 19 nt, synthetic construct
  source 1..19: mol_type = other RNA
tatcacaggacattctttc

SEQ ID NO: 1183 - RNA, 19 nt, synthetic construct
  source 1..19: mol_type = other RNA
atcacaggacattctttca

SEQ ID NO: 1184 - RNA, 19 nt, synthetic construct
  source 1..19: mol_type = other RNA
tcacaggacattctttcac

SEQ ID NO: 1185 - RNA, 19 nt, synthetic construct
  source 1..19: mol_type = other RNA
cacaggacattctttcacc

SEQ ID NO: 1186 - RNA, 19 nt, synthetic construct
  source 1..19: mol_type = other RNA
acaggacattctttcacca

SEQ ID NO: 1187 - RNA, 19 nt, synthetic construct
  source 1..19: mol_type = other RNA
caggacattctttcaccag

SEQ ID NO: 1188 - RNA, 19 nt, synthetic construct
  source 1..19: mol_type = other RNA
aggacattctttcaccaga

SEQ ID NO: 1189 - RNA, 19 nt, synthetic construct
  source 1..19: mol_type = other RNA
ggacattctttcaccagag

SEQ ID NO: 1190 - RNA, 19 nt, synthetic construct
  source 1..19: mol_type = other RNA
gacattctttcaccagagt

SEQ ID NO: 1191 - RNA, 19 nt, synthetic construct
  source 1..19: mol_type = other RNA
acattctttcaccagagtt

SEQ ID NO: 1192 - RNA, 19 nt, synthetic construct
  source 1..19: mol_type = other RNA
cattctttcaccagagttt

SEQ ID NO: 1193 - RNA, 19 nt, synthetic construct
  source 1..19: mol_type = other RNA
attctttcaccagagtttc

SEQ ID NO: 1194 - RNA, 19 nt, synthetic construct
  source 1..19: mol_type = other RNA
ttctttcaccagagtttca

SEQ ID NO: 1195 - RNA, 19 nt, synthetic construct
  source 1..19: mol_type = other RNA
tctttcaccagagtttcat

SEQ ID NO: 1196 - RNA, 19 nt, synthetic construct
  source 1..19: mol_type = other RNA
ctttcaccagagtttcatg

SEQ ID NO: 1197 - RNA, 19 nt, synthetic construct
  source 1..19: mol_type = other RNA
tttcaccagagtttcatga

SEQ ID NO: 1198 - RNA, 19 nt, synthetic construct
  source 1..19: mol_type = other RNA
ttcaccagagtttcatgaa

SEQ ID NO: 1199 - RNA, 19 nt, synthetic construct
  source 1..19: mol_type = other RNA
tcaccagagtttcatgaac

SEQ ID NO: 1200 - RNA, 19 nt, synthetic construct
  source 1..19: mol_type = other RNA
caccagagtttcatgaaca

SEQ ID NO: 1201 - RNA, 19 nt, synthetic construct
  source 1..19: mol_type = other RNA
accagagtttcatgaacat

SEQ ID NO: 1202 - RNA, 19 nt, synthetic construct
  source 1..19: mol_type = other RNA
ccagagtttcatgaacatt

SEQ ID NO: 1203 - RNA, 19 nt, synthetic construct
  source 1..19: mol_type = other RNA
cagagtttcatgaacattt

SEQ ID NO: 1204 - RNA, 19 nt, synthetic construct
  source 1..19: mol_type = other RNA
agagtttcatgaacatttc

SEQ ID NO: 1205 - RNA, 19 nt, synthetic construct
  source 1..19: mol_type = other RNA
gagtttcatgaacatttca

SEQ ID NO: 1206 - RNA, 19 nt, synthetic construct
  source 1..19: mol_type = other RNA
agtttcatgaacatttcaa

SEQ ID NO: 1207 - RNA, 19 nt, synthetic construct
  source 1..19: mol_type = other RNA
gtttcatgaacatttcaat

SEQ ID NO: 1208 - RNA, 19 nt, synthetic construct
  source 1..19: mol_type = other RNA
tttcatgaacatttcaata

SEQ ID NO: 1209 - RNA, 19 nt, synthetic construct
  source 1..19: mol_type = other RNA
ttcatgaacatttcaataa

SEQ ID NO: 1210 - RNA, 19 nt, synthetic construct
  source 1..19: mol_type = other RNA
tcatgaacatttcaataaa

SEQ ID NO: 1211 - RNA, 19 nt, synthetic construct
  source 1..19: mol_type = other RNA
catgaacatttcaataaat

SEQ ID NO: 1212 - RNA, 19 nt, synthetic construct
  source 1..19: mol_type = other RNA
atgaacatttcaataaatt

SEQ ID NO: 1213 - RNA, 19 nt, synthetic construct
  source 1..19: mol_type = other RNA
tgaacatttcaataaattg

SEQ ID NO: 1214 - RNA, 19 nt, synthetic construct
  source 1..19: mol_type = other RNA
gaacatttcaataaattga

SEQ ID NO: 1215 - RNA, 19 nt, synthetic construct
  source 1..19: mol_type = other RNA
aacatttcaataaattgat

SEQ ID NO: 1216 - RNA, 19 nt, synthetic construct
  source 1..19: mol_type = other RNA
acatttcaataaattgatg

SEQ ID NO: 1217 - RNA, 19 nt, synthetic construct
  source 1..19: mol_type = other RNA
catttcaataaattgatgg

SEQ ID NO: 1218 - RNA, 19 nt, synthetic construct
  source 1..19: mol_type = other RNA
atttcaataaattgatggc

SEQ ID NO: 1219 - RNA, 19 nt, synthetic construct
  source 1..19: mol_type = other RNA
tttcaataaattgatggcc

SEQ ID NO: 1220 - RNA, 19 nt, synthetic construct
  source 1..19: mol_type = other RNA
ttcaataaattgatggcca

SEQ ID NO: 1221 - RNA, 19 nt, synthetic construct
  source 1..19: mol_type = other RNA
tcaataaattgatggccag

SEQ ID NO: 1222 - RNA, 19 nt, synthetic construct
  source 1..19: mol_type = other RNA
caataaattgatggccaga

SEQ ID NO: 1223 - RNA, 19 nt, synthetic construct
  source 1..19: mol_type = other RNA
aataaattgatggccagac

SEQ ID NO: 1224 - RNA, 19 nt, synthetic construct
  source 1..19: mol_type = other RNA
ataaattgatggccagacc

SEQ ID NO: 1225 - RNA, 19 nt, synthetic construct
  source 1..19: mol_type = other RNA
taaattgatggccagacct

SEQ ID NO: 1226 - RNA, 19 nt, synthetic construct
  source 1..19: mol_type = other RNA
aaattgatggccagacctg

SEQ ID NO: 1227 - RNA, 19 nt, synthetic construct
  source 1..19: mol_type = other RNA
aattgatggccagacctgc

SEQ ID NO: 1228 - RNA, 19 nt, synthetic construct
  source 1..19: mol_type = other RNA
attgatggccagacctgca

SEQ ID NO: 1229 - RNA, 19 nt, synthetic construct
  source 1..19: mol_type = other RNA
ttgatggccagacctgcag

SEQ ID NO: 1230 - RNA, 19 nt, synthetic construct
  source 1..19: mol_type = other RNA
tgatggccagacctgcagt

SEQ ID NO: 1231 - RNA, 19 nt, synthetic construct
  source 1..19: mol_type = other RNA
gatggccagacctgcagtt

SEQ ID NO: 1232 - RNA, 19 nt, synthetic construct
  source 1..19: mol_type = other RNA
atggccagacctgcagttg

SEQ ID NO: 1233 - RNA, 19 nt, synthetic construct
  source 1..19: mol_type = other RNA
tggccagacctgcagttgc

SEQ ID NO: 1234 - RNA, 19 nt, synthetic construct
  source 1..19: mol_type = other RNA
ggccagacctgcagttgct

SEQ ID NO: 1235 - RNA, 19 nt, synthetic construct
  source 1..19: mol_type = other RNA
gccagacctgcagttgctc

SEQ ID NO: 1236 - RNA, 19 nt, synthetic construct
  source 1..19: mol_type = other RNA
ccagacctgcagttgctct

SEQ ID NO: 1237 - RNA, 19 nt, synthetic construct
  source 1..19: mol_type = other RNA
cagacctgcagttgctcta

SEQ ID NO: 1238 - RNA, 19 nt, synthetic construct
  source 1..19: mol_type = other RNA
agacctgcagttgctctac

SEQ ID NO: 1239 - RNA, 19 nt, synthetic construct
  source 1..19: mol_type = other RNA
gacctgcagttgctctaca

SEQ ID NO: 1240 - RNA, 19 nt, synthetic construct
  source 1..19: mol_type = other RNA
acctgcagttgctctacac

SEQ ID NO: 1241 - RNA, 19 nt, synthetic construct
  source 1..19: mol_type = other RNA
cctgcagttgctctacact

SEQ ID NO: 1242 - RNA, 19 nt, synthetic construct
  source 1..19: mol_type = other RNA
ctgcagttgctctacactt

SEQ ID NO: 1243 - RNA, 19 nt, synthetic construct
  source 1..19: mol_type = other RNA
tgcagttgctctacacttt

SEQ ID NO: 1244 - RNA, 19 nt, synthetic construct
  source 1..19: mol_type = other RNA
gcagttgctctacactttc

SEQ ID NO: 1245 - RNA, 19 nt, synthetic construct
  source 1..19: mol_type = other RNA
cagttgctctacactttca

SEQ ID NO: 1246 - RNA, 19 nt, synthetic construct
  source 1..19: mol_type = other RNA
agttgctctacactttcag

SEQ ID NO: 1247 - RNA, 19 nt, synthetic construct
  source 1..19: mol_type = other RNA
gttgctctacactttcagt

SEQ ID NO: 1248 - RNA, 19 nt, synthetic construct
  source 1..19: mol_type = other RNA
ttgctctacactttcagtc

SEQ ID NO: 1249 - RNA, 19 nt, synthetic construct
  source 1..19: mol_type = other RNA
tgctctacactttcagtcc

SEQ ID NO: 1250 - RNA, 19 nt, synthetic construct
  source 1..19: mol_type = other RNA
gctctacactttcagtcca

SEQ ID NO: 1251 - RNA, 19 nt, synthetic construct
  source 1..19: mol_type = other RNA
ctctacactttcagtccat

SEQ ID NO: 1252 - RNA, 19 nt, synthetic construct
  source 1..19: mol_type = other RNA
tctacactttcagtccatt

SEQ ID NO: 1253 - RNA, 19 nt, synthetic construct
  source 1..19: mol_type = other RNA
ctacactttcagtccattg

SEQ ID NO: 1254 - RNA, 19 nt, synthetic construct
  source 1..19: mol_type = other RNA
tacactttcagtccattgc

SEQ ID NO: 1255 - RNA, 19 nt, synthetic construct
  source 1..19: mol_type = other RNA
acactttcagtccattgct

SEQ ID NO: 1256 - RNA, 19 nt, synthetic construct
  source 1..19: mol_type = other RNA
cactttcagtccattgctg

SEQ ID NO: 1257 - RNA, 19 nt, synthetic construct
  source 1..19: mol_type = other RNA
actttcagtccattgctga

SEQ ID NO: 1258 - RNA, 19 nt, synthetic construct
  source 1..19: mol_type = other RNA
ctttcagtccattgctgat

SEQ ID NO: 1259 - RNA, 19 nt, synthetic construct
  source 1..19: mol_type = other RNA
tttcagtccattgctgatg

SEQ ID NO: 1260 - RNA, 19 nt, synthetic construct
  source 1..19: mol_type = other RNA
ttcagtccattgctgatgg

SEQ ID NO: 1261 - RNA, 19 nt, synthetic construct
  source 1..19: mol_type = other RNA
tcagtccattgctgatggt

SEQ ID NO: 1262 - RNA, 19 nt, synthetic construct
  source 1..19: mol_type = other RNA
cagtccattgctgatggtt

SEQ ID NO: 1263 - RNA, 19 nt, synthetic construct
  source 1..19: mol_type = other RNA
agtccattgctgatggttt

SEQ ID NO: 1264 - RNA, 19 nt, synthetic construct
  source 1..19: mol_type = other RNA
gtccattgctgatggtttt

SEQ ID NO: 1265 - RNA, 19 nt, synthetic construct
  source 1..19: mol_type = other RNA
tccattgctgatggtttta

SEQ ID NO: 1266 - RNA, 19 nt, synthetic construct
  source 1..19: mol_type = other RNA
ccattgctgatggttttaa

SEQ ID NO: 1267 - RNA, 19 nt, synthetic construct
  source 1..19: mol_type = other RNA
cattgctgatggttttaaa

SEQ ID NO: 1268 - RNA, 19 nt, synthetic construct
  source 1..19: mol_type = other RNA
attgctgatggttttaaag

SEQ ID NO: 1269 - RNA, 19 nt, synthetic construct
  source 1..19: mol_type = other RNA
ttgctgatggttttaaaga

SEQ ID NO: 1270 - RNA, 19 nt, synthetic construct
  source 1..19: mol_type = other RNA
tgctgatggttttaaagag

SEQ ID NO: 1271 - RNA, 19 nt, synthetic construct
  source 1..19: mol_type = other RNA
gctgatggttttaaagagg

SEQ ID NO: 1272 - RNA, 19 nt, synthetic construct
  source 1..19: mol_type = other RNA
ctgatggttttaaagaggc

SEQ ID NO: 1273 - RNA, 19 nt, synthetic construct
  source 1..19: mol_type = other RNA
tgatggttttaaagaggca

SEQ ID NO: 1274 - RNA, 19 nt, synthetic construct
  source 1..19: mol_type = other RNA
gatggttttaaagaggcag

SEQ ID NO: 1275 - RNA, 19 nt, synthetic construct
  source 1..19: mol_type = other RNA
atggttttaaagaggcagt

SEQ ID NO: 1276 - RNA, 19 nt, synthetic construct
  source 1..19: mol_type = other RNA
tggttttaaagaggcagtt

SEQ ID NO: 1277 - RNA, 19 nt, synthetic construct
  source 1..19: mol_type = other RNA
ggttttaaagaggcagttc

SEQ ID NO: 1278 - RNA, 19 nt, synthetic construct
  source 1..19: mol_type = other RNA
gttttaaagaggcagttcg

SEQ ID NO: 1279 - RNA, 19 nt, synthetic construct
  source 1..19: mol_type = other RNA
ttttaaagaggcagttcgt

SEQ ID NO: 1280 - RNA, 19 nt, synthetic construct
  source 1..19: mol_type = other RNA
tttaaagaggcagttcgtt

SEQ ID NO: 1281 - RNA, 19 nt, synthetic construct
  source 1..19: mol_type = other RNA
ttaaagaggcagttcgtta

SEQ ID NO: 1282 - RNA, 19 nt, synthetic construct
  source 1..19: mol_type = other RNA
taaagaggcagttcgttat

SEQ ID NO: 1283 - RNA, 19 nt, synthetic construct
  source 1..19: mol_type = other RNA
aaagaggcagttcgttatg

SEQ ID NO: 1284 - RNA, 19 nt, synthetic construct
  source 1..19: mol_type = other RNA
aagaggcagttcgttatgt

SEQ ID NO: 1285 - RNA, 19 nt, synthetic construct
  source 1..19: mol_type = other RNA
agaggcagttcgttatgtc

SEQ ID NO: 1286 - RNA, 19 nt, synthetic construct
  source 1..19: mol_type = other RNA
gaggcagttcgttatgtcc

SEQ ID NO: 1287 - RNA, 19 nt, synthetic construct
  source 1..19: mol_type = other RNA
aggcagttcgttatgtcct

SEQ ID NO: 1288 - RNA, 19 nt, synthetic construct
  source 1..19: mol_type = other RNA
ggcagttcgttatgtcctt

SEQ ID NO: 1289 - RNA, 19 nt, synthetic construct
  source 1..19: mol_type = other RNA
gcagttcgttatgtccttc

SEQ ID NO: 1290 - RNA, 19 nt, synthetic construct
  source 1..19: mol_type = other RNA
cagttcgttatgtccttcc

SEQ ID NO: 1291 - RNA, 19 nt, synthetic construct
  source 1..19: mol_type = other RNA
agttcgttatgtccttcca

SEQ ID NO: 1292 - RNA, 19 nt, synthetic construct
  source 1..19: mol_type = other RNA
gttcgttatgtccttccac

SEQ ID NO: 1293 - RNA, 19 nt, synthetic construct
  source 1..19: mol_type = other RNA
ttcgttatgtccttccacg

SEQ ID NO: 1294 - RNA, 19 nt, synthetic construct
  source 1..19: mol_type = other RNA
tcgttatgtccttccacgt

SEQ ID NO: 1295 - RNA, 19 nt, synthetic construct
  source 1..19: mol_type = other RNA
cgttatgtccttccacgtc

SEQ ID NO: 1296 - RNA, 19 nt, synthetic construct
  source 1..19: mol_type = other RNA
gttatgtccttccacgtct

SEQ ID NO: 1297 - RNA, 19 nt, synthetic construct
  source 1..19: mol_type = other RNA
ttatgtccttccacgtctt

SEQ ID NO: 1298 - RNA, 19 nt, synthetic construct
  source 1..19: mol_type = other RNA
tatgtccttccacgtctta

SEQ ID NO: 1299 - RNA, 19 nt, synthetic construct
  source 1..19: mol_type = other RNA
atgtccttccacgtcttat

SEQ ID NO: 1300 - RNA, 19 nt, synthetic construct
  source 1..19: mol_type = other RNA
tgtccttccacgtcttatg

SEQ ID NO: 1301 - RNA, 19 nt, synthetic construct
  source 1..19: mol_type = other RNA
gtccttccacgtcttatgc

SEQ ID NO: 1302 - RNA, 19 nt, synthetic construct
  source 1..19: mol_type = other RNA
tccttccacgtcttatgct

SEQ ID NO: 1303 - RNA, 19 nt, synthetic construct
  source 1..19: mol_type = other RNA
ccttccacgtcttatgctg

SEQ ID NO: 1304 - RNA, 19 nt, synthetic construct
  source 1..19: mol_type = other RNA
cttccacgtcttatgctgg

SEQ ID NO: 1305 - RNA, 19 nt, synthetic construct
  source 1..19: mol_type = other RNA
ttccacgtcttatgctggt

SEQ ID NO: 1306 - RNA, 19 nt, synthetic construct
  source 1..19: mol_type = other RNA
tccacgtcttatgctggtg

SEQ ID NO: 1307 - RNA, 19 nt, synthetic construct
  source 1..19: mol_type = other RNA
ccacgtcttatgctggtgc

SEQ ID NO: 1308 - RNA, 19 nt, synthetic construct
  source 1..19: mol_type = other RNA
cacgtcttatgctggtgcc

SEQ ID NO: 1309 - RNA, 19 nt, synthetic construct
  source 1..19: mol_type = other RNA
acgtcttatgctggtgcca

SEQ ID NO: 1310 - RNA, 19 nt, synthetic construct
  source 1..19: mol_type = other RNA
cgtcttatgctggtgccag

SEQ ID NO: 1311 - RNA, 19 nt, synthetic construct
  source 1..19: mol_type = other RNA
gtcttatgctggtgccagt

SEQ ID NO: 1312 - RNA, 19 nt, synthetic construct
  source 1..19: mol_type = other RNA
tcttatgctggtgccagtg

SEQ ID NO: 1313 - RNA, 19 nt, synthetic construct
  source 1..19: mol_type = other RNA
cttatgctggtgccagtgt

SEQ ID NO: 1314 - RNA, 19 nt, synthetic construct
  source 1..19: mol_type = other RNA
ttatgctggtgccagtgta

SEQ ID NO: 1315 - RNA, 19 nt, synthetic construct
  source 1..19: mol_type = other RNA
tatgctggtgccagtgtat

SEQ ID NO: 1316 - RNA, 19 nt, synthetic construct
  source 1..19: mol_type = other RNA
atgctggtgccagtgtatc

SEQ ID NO: 1317 - RNA, 19 nt, synthetic construct
  source 1..19: mol_type = other RNA
tgctggtgccagtgtatca

SEQ ID NO: 1318 - RNA, 19 nt, synthetic construct
  source 1..19: mol_type = other RNA
gctggtgccagtgtatcac

SEQ ID NO: 1319 - RNA, 19 nt, synthetic construct
  source 1..19: mol_type = other RNA
ctggtgccagtgtatcact

SEQ ID NO: 1320 - RNA, 19 nt, synthetic construct
  source 1..19: mol_type = other RNA
tggtgccagtgtatcactg

SEQ ID NO: 1321 - RNA, 19 nt, synthetic construct
  source 1..19: mol_type = other RNA
ggtgccagtgtatcactgt

SEQ ID NO: 1322 - RNA, 19 nt, synthetic construct
  source 1..19: mol_type = other RNA
gtgccagtgtatcactgtt

SEQ ID NO: 1323 - RNA, 19 nt, synthetic construct
  source 1..19: mol_type = other RNA
tgccagtgtatcactgttg

SEQ ID NO: 1324 - RNA, 19 nt, synthetic construct
  source 1..19: mol_type = other RNA
gccagtgtatcactgttgg

SEQ ID NO: 1325 - RNA, 19 nt, synthetic construct
  source 1..19: mol_type = other RNA
ccagtgtatcactgttggc

SEQ ID NO: 1326 - RNA, 19 nt, synthetic construct
  source 1..19: mol_type = other RNA
cagtgtatcactgttggca

SEQ ID NO: 1327 - RNA, 19 nt, synthetic construct
  source 1..19: mol_type = other RNA
agtgtatcactgttggcac

SEQ ID NO: 1328 - RNA, 19 nt, synthetic construct
  source 1..19: mol_type = other RNA
gtgtatcactgttggcact

SEQ ID NO: 1329 - RNA, 19 nt, synthetic construct
  source 1..19: mol_type = other RNA
tgtatcactgttggcacta

SEQ ID NO: 1330 - RNA, 19 nt, synthetic construct
  source 1..19: mol_type = other RNA
gtatcactgttggcactac

SEQ ID NO: 1331 - RNA, 19 nt, synthetic construct
  source 1..19: mol_type = other RNA
tatcactgttggcactact

SEQ ID NO: 1332 - RNA, 19 nt, synthetic construct
  source 1..19: mol_type = other RNA
atcactgttggcactactt

SEQ ID NO: 1333 - RNA, 19 nt, synthetic construct
  source 1..19: mol_type = other RNA
tcactgttggcactacttt

SEQ ID NO: 1334 - RNA, 19 nt, synthetic construct
  source 1..19: mol_type = other RNA
cactgttggcactactttg

SEQ ID NO: 1335 - RNA, 19 nt, synthetic construct
  source 1..19: mol_type = other RNA
actgttggcactactttga

SEQ ID NO: 1336 - RNA, 19 nt, synthetic construct
  source 1..19: mol_type = other RNA
ctgttggcactactttgag

SEQ ID NO: 1337 - RNA, 19 nt, synthetic construct
  source 1..19: mol_type = other RNA
tgttggcactactttgagt

SEQ ID NO: 1338 - RNA, 19 nt, synthetic construct
  source 1..19: mol_type = other RNA
gttggcactactttgagtt

SEQ ID NO: 1339 - RNA, 19 nt, synthetic construct
  source 1..19: mol_type = other RNA
ttggcactactttgagtta

SEQ ID NO: 1340 - RNA, 19 nt, synthetic construct
  source 1..19: mol_type = other RNA
tggcactactttgagttac

SEQ ID NO: 1341 - RNA, 19 nt, synthetic construct
  source 1..19: mol_type = other RNA
ggcactactttgagttact

SEQ ID NO: 1342 - RNA, 19 nt, synthetic construct
  source 1..19: mol_type = other RNA
gcactactttgagttacta

SEQ ID NO: 1343 - RNA, 19 nt, synthetic construct
  source 1..19: mol_type = other RNA
cactactttgagttactaa

SEQ ID NO: 1344 - RNA, 19 nt, synthetic construct
  source 1..19: mol_type = other RNA
actactttgagttactaaa

SEQ ID NO: 1345 - RNA, 19 nt, synthetic construct
  source 1..19: mol_type = other RNA
ctactttgagttactaaag

SEQ ID NO: 1346 - RNA, 19 nt, synthetic construct
  source 1..19: mol_type = other RNA
tactttgagttactaaagc

SEQ ID NO: 1347 - RNA, 19 nt, synthetic construct
  source 1..19: mol_type = other RNA
actttgagttactaaagca

SEQ ID NO: 1348 - RNA, 19 nt, synthetic construct
  source 1..19: mol_type = other RNA
ctttgagttactaaagcaa

SEQ ID NO: 1349 - RNA, 19 nt, synthetic construct
  source 1..19: mol_type = other RNA
tttgagttactaaagcaat

SEQ ID NO: 1350 - RNA, 19 nt, synthetic construct
  source 1..19: mol_type = other RNA
ttgagttactaaagcaatt

SEQ ID NO: 1351 - RNA, 19 nt, synthetic construct
  source 1..19: mol_type = other RNA
tgagttactaaagcaattg

SEQ ID NO: 1352 - RNA, 19 nt, synthetic construct
  source 1..19: mol_type = other RNA
gagttactaaagcaattga

SEQ ID NO: 1353 - RNA, 19 nt, synthetic construct
  source 1..19: mol_type = other RNA
agttactaaagcaattgaa

SEQ ID NO: 1354 - RNA, 19 nt, synthetic construct
  source 1..19: mol_type = other RNA
gttactaaagcaattgaaa

SEQ ID NO: 1355 - RNA, 19 nt, synthetic construct
  source 1..19: mol_type = other RNA
ttactaaagcaattgaaag

SEQ ID NO: 1356 - RNA, 19 nt, synthetic construct
  source 1..19: mol_type = other RNA
tactaaagcaattgaaagc

SEQ ID NO: 1357 - RNA, 19 nt, synthetic construct
  source 1..19: mol_type = other RNA
actaaagcaattgaaagca

SEQ ID NO: 1358 - RNA, 19 nt, synthetic construct
  source 1..19: mol_type = other RNA
ctaaagcaattgaaagcat

SEQ ID NO: 1359 - RNA, 19 nt, synthetic construct
  source 1..19: mol_type = other RNA
taaagcaattgaaagcatg

SEQ ID NO: 1360 - RNA, 19 nt, synthetic construct
  source 1..19: mol_type = other RNA
aaagcaattgaaagcatgt

SEQ ID NO: 1361 - RNA, 19 nt, synthetic construct
  source 1..19: mol_type = other RNA
aagcaattgaaagcatgta

SEQ ID NO: 1362 - RNA, 19 nt, synthetic construct
  source 1..19: mol_type = other RNA
agcaattgaaagcatgtag

SEQ ID NO: 1363 - RNA, 19 nt, synthetic construct
  source 1..19: mol_type = other RNA
gcaattgaaagcatgtagt

SEQ ID NO: 1364 - RNA, 19 nt, synthetic construct
  source 1..19: mol_type = other RNA
caattgaaagcatgtagtg

SEQ ID NO: 1365 - RNA, 19 nt, synthetic construct
  source 1..19: mol_type = other RNA
aattgaaagcatgtagtga

SEQ ID NO: 1366 - RNA, 19 nt, synthetic construct
  source 1..19: mol_type = other RNA
attgaaagcatgtagtgaa

SEQ ID NO: 1367 - RNA, 19 nt, synthetic construct
  source 1..19: mol_type = other RNA
ttgaaagcatgtagtgaag

SEQ ID NO: 1368 - RNA, 19 nt, synthetic construct
  source 1..19: mol_type = other RNA
tgaaagcatgtagtgaaga

SEQ ID NO: 1369 - RNA, 19 nt, synthetic construct
  source 1..19: mol_type = other RNA
gaaagcatgtagtgaagaa

SEQ ID NO: 1370 - RNA, 19 nt, synthetic construct
  source 1..19: mol_type = other RNA
aaagcatgtagtgaagaac

SEQ ID NO: 1371 - RNA, 19 nt, synthetic construct
  source 1..19: mol_type = other RNA
aagcatgtagtgaagaaca

SEQ ID NO: 1372 - RNA, 19 nt, synthetic construct
  source 1..19: mol_type = other RNA
agcatgtagtgaagaacaa

SEQ ID NO: 1373 - RNA, 19 nt, synthetic construct
  source 1..19: mol_type = other RNA
gcatgtagtgaagaacaag

SEQ ID NO: 1374 - RNA, 19 nt, synthetic construct
  source 1..19: mol_type = other RNA
catgtagtgaagaacaaga

SEQ ID NO: 1375 - RNA, 19 nt, synthetic construct
  source 1..19: mol_type = other RNA
atgtagtgaagaacaagaa

SEQ ID NO: 1376 - RNA, 19 nt, synthetic construct
  source 1..19: mol_type = other RNA
tgtagtgaagaacaagaag

SEQ ID NO: 1377 - RNA, 19 nt, synthetic construct
  source 1..19: mol_type = other RNA
gtagtgaagaacaagaaga

SEQ ID NO: 1378 - RNA, 19 nt, synthetic construct
  source 1..19: mol_type = other RNA
tagtgaagaacaagaagac

SEQ ID NO: 1379 - RNA, 19 nt, synthetic construct
  source 1..19: mol_type = other RNA
agtgaagaacaagaagaca

SEQ ID NO: 1380 - RNA, 19 nt, synthetic construct
  source 1..19: mol_type = other RNA
gtgaagaacaagaagacag

SEQ ID NO: 1381 - RNA, 19 nt, synthetic construct
  source 1..19: mol_type = other RNA
tgaagaacaagaagacaga

SEQ ID NO: 1382 - RNA, 19 nt, synthetic construct
  source 1..19: mol_type = other RNA
gaagaacaagaagacagag

SEQ ID NO: 1383 - RNA, 19 nt, synthetic construct
  source 1..19: mol_type = other RNA
aagaacaagaagacagaga

SEQ ID NO: 1384 - RNA, 19 nt, synthetic construct
  source 1..19: mol_type = other RNA
agaacaagaagacagagaa

SEQ ID NO: 1385 - RNA, 19 nt, synthetic construct
  source 1..19: mol_type = other RNA
gaacaagaagacagagaat

SEQ ID NO: 1386 - RNA, 19 nt, synthetic construct
  source 1..19: mol_type = other RNA
aacaagaagacagagaatg

SEQ ID NO: 1387 - RNA, 19 nt, synthetic construct
  source 1..19: mol_type = other RNA
acaagaagacagagaatgt

SEQ ID NO: 1388 - RNA, 19 nt, synthetic construct
  source 1..19: mol_type = other RNA
caagaagacagagaatgtt

SEQ ID NO: 1389 - RNA, 19 nt, synthetic construct
  source 1..19: mol_type = other RNA
aagaagacagagaatgttt

SEQ ID NO: 1390 - RNA, 19 nt, synthetic construct
  source 1..19: mol_type = other RNA
agaagacagagaatgtttg

SEQ ID NO: 1391 - RNA, 19 nt, synthetic construct
  source 1..19: mol_type = other RNA
gaagacagagaatgtttga

SEQ ID NO: 1392 - RNA, 19 nt, synthetic construct
  source 1..19: mol_type = other RNA
aagacagagaatgtttgaa

SEQ ID NO: 1393 - RNA, 19 nt, synthetic construct
  source 1..19: mol_type = other RNA
agacagagaatgtttgaac

SEQ ID NO: 1394 - RNA, 19 nt, synthetic construct
  source 1..19: mol_type = other RNA
gacagagaatgtttgaacc

SEQ ID NO: 1395 - RNA, 19 nt, synthetic construct
  source 1..19: mol_type = other RNA
acagagaatgtttgaacca

SEQ ID NO: 1396 - RNA, 19 nt, synthetic construct
  source 1..19: mol_type = other RNA
cagagaatgtttgaaccaa

SEQ ID NO: 1397 - RNA, 19 nt, synthetic construct
  source 1..19: mol_type = other RNA
agagaatgtttgaaccaag

SEQ ID NO: 1398 - RNA, 19 nt, synthetic construct
  source 1..19: mol_type = other RNA
gagaatgtttgaaccaagc

SEQ ID NO: 1399 - RNA, 19 nt, synthetic construct
  source 1..19: mol_type = other RNA
agaatgtttgaaccaagct

SEQ ID NO: 1400 - RNA, 19 nt, synthetic construct
  source 1..19: mol_type = other RNA
gaatgtttgaaccaagcta

SEQ ID NO: 1401 - RNA, 19 nt, synthetic construct
  source 1..19: mol_type = other RNA
aatgtttgaaccaagctat

SEQ ID NO: 1402 - RNA, 19 nt, synthetic construct
  source 1..19: mol_type = other RNA
atgtttgaaccaagctatt

SEQ ID NO: 1403 - RNA, 19 nt, synthetic construct
  source 1..19: mol_type = other RNA
tgtttgaaccaagctatta

SEQ ID NO: 1404 - RNA, 19 nt, synthetic construct
  source 1..19: mol_type = other RNA
gtttgaaccaagctattac

SEQ ID NO: 1405 - RNA, 19 nt, synthetic construct
  source 1..19: mol_type = other RNA
tttgaaccaagctattact

SEQ ID NO: 1406 - RNA, 19 nt, synthetic construct
  source 1..19: mol_type = other RNA
ttgaaccaagctattactg

SEQ ID NO: 1407 - RNA, 19 nt, synthetic construct
  source 1..19: mol_type = other RNA
tgaaccaagctattactgc

SEQ ID NO: 1408 - RNA, 19 nt, synthetic construct
  source 1..19: mol_type = other RNA
gaaccaagctattactgct

SEQ ID NO: 1409 - RNA, 19 nt, synthetic construct
  source 1..19: mol_type = other RNA
aaccaagctattactgctc

SEQ ID NO: 1410 - RNA, 19 nt, synthetic construct
  source 1..19: mol_type = other RNA
accaagctattactgctct

SEQ ID NO: 1411 - RNA, 19 nt, synthetic construct
  source 1..19: mol_type = other RNA
ccaagctattactgctctc

SEQ ID NO: 1412 - RNA, 19 nt, synthetic construct
  source 1..19: mol_type = other RNA
caagctattactgctctca

SEQ ID NO: 1413 - RNA, 19 nt, synthetic construct
  source 1..19: mol_type = other RNA
aagctattactgctctcat

SEQ ID NO: 1414 - RNA, 19 nt, synthetic construct
  source 1..19: mol_type = other RNA
agctattactgctctcatg

SEQ ID NO: 1415 - RNA, 19 nt, synthetic construct
  source 1..19: mol_type = other RNA
gctattactgctctcatga

SEQ ID NO: 1416 - RNA, 19 nt, synthetic construct
  source 1..19: mol_type = other RNA
ctattactgctctcatgaa

SEQ ID NO: 1417 - RNA, 19 nt, synthetic construct
  source 1..19: mol_type = other RNA
tattactgctctcatgaat

SEQ ID NO: 1418 - RNA, 19 nt, synthetic construct
  source 1..19: mol_type = other RNA
attactgctctcatgaatc

SEQ ID NO: 1419 - RNA, 19 nt, synthetic construct
  source 1..19: mol_type = other RNA
ttactgctctcatgaatct

SEQ ID NO: 1420 - RNA, 19 nt, synthetic construct
  source 1..19: mol_type = other RNA
tactgctctcatgaatctc

SEQ ID NO: 1421 - RNA, 19 nt, synthetic construct
  source 1..19: mol_type = other RNA
actgctctcatgaatctcc

SEQ ID NO: 1422 - RNA, 19 nt, synthetic construct
  source 1..19: mol_type = other RNA
ctgctctcatgaatctcca

SEQ ID NO: 1423 - RNA, 19 nt, synthetic construct
  source 1..19: mol_type = other RNA
tgctctcatgaatctccaa

SEQ ID NO: 1424 - RNA, 19 nt, synthetic construct
  source 1..19: mol_type = other RNA
gctctcatgaatctccaag

SEQ ID NO: 1425 - RNA, 19 nt, synthetic construct
  source 1..19: mol_type = other RNA
ctctcatgaatctccaagg

SEQ ID NO: 1426 - RNA, 19 nt, synthetic construct
  source 1..19: mol_type = other RNA
tctcatgaatctccaaggt

SEQ ID NO: 1427 - RNA, 19 nt, synthetic construct
  source 1..19: mol_type = other RNA
ctcatgaatctccaaggta

SEQ ID NO: 1428 - RNA, 19 nt, synthetic construct
  source 1..19: mol_type = other RNA
tcatgaatctccaaggtag

SEQ ID NO: 1429 - RNA, 19 nt, synthetic construct
  source 1..19: mol_type = other RNA
catgaatctccaaggtagc

SEQ ID NO: 1430 - RNA, 19 nt, synthetic construct
  source 1..19: mol_type = other RNA
atgaatctccaaggtagca

SEQ ID NO: 1431 - RNA, 19 nt, synthetic construct
  source 1..19: mol_type = other RNA
tgaatctccaaggtagcat

SEQ ID NO: 1432 - RNA, 19 nt, synthetic construct
  source 1..19: mol_type = other RNA
gaatctccaaggtagcatg

SEQ ID NO: 1433 - RNA, 19 nt, synthetic construct
  source 1..19: mol_type = other RNA
aatctccaaggtagcatgg

SEQ ID NO: 1434 - RNA, 19 nt, synthetic construct
  source 1..19: mol_type = other RNA
atctccaaggtagcatgga

SEQ ID NO: 1435 - RNA, 19 nt, synthetic construct
  source 1..19: mol_type = other RNA
tctccaaggtagcatggac

SEQ ID NO: 1436 - RNA, 19 nt, synthetic construct
  source 1..19: mol_type = other RNA
ctccaaggtagcatggacc

SEQ ID NO: 1437 - RNA, 19 nt, synthetic construct
  source 1..19: mol_type = other RNA
tccaaggtagcatggaccg

SEQ ID NO: 1438 - RNA, 19 nt, synthetic construct
  source 1..19: mol_type = other RNA
ccaaggtagcatggaccga

SEQ ID NO: 1439 - RNA, 19 nt, synthetic construct
  source 1..19: mol_type = other RNA
caaggtagcatggaccgaa

SEQ ID NO: 1440 - RNA, 19 nt, synthetic construct
  source 1..19: mol_type = other RNA
aaggtagcatggaccgaat

SEQ ID NO: 1441 - RNA, 19 nt, synthetic construct
  source 1..19: mol_type = other RNA
aggtagcatggaccgaatt

SEQ ID NO: 1442 - RNA, 19 nt, synthetic construct
  source 1..19: mol_type = other RNA
ggtagcatggaccgaattt

SEQ ID NO: 1443 - RNA, 19 nt, synthetic construct
  source 1..19: mol_type = other RNA
gtagcatggaccgaattta

SEQ ID NO: 1444 - RNA, 19 nt, synthetic construct
  source 1..19: mol_type = other RNA
tagcatggaccgaatttac

SEQ ID NO: 1445 - RNA, 19 nt, synthetic construct
  source 1..19: mol_type = other RNA
agcatggaccgaatttaca

SEQ ID NO: 1446 - RNA, 19 nt, synthetic construct
  source 1..19: mol_type = other RNA
gcatggaccgaatttacaa

SEQ ID NO: 1447 - RNA, 19 nt, synthetic construct
  source 1..19: mol_type = other RNA
catggaccgaatttacaag

SEQ ID NO: 1448 - RNA, 19 nt, synthetic construct
  source 1..19: mol_type = other RNA
atggaccgaatttacaagc

SEQ ID NO: 1449 - RNA, 19 nt, synthetic construct
  source 1..19: mol_type = other RNA
tggaccgaatttacaagca

SEQ ID NO: 1450 - RNA, 19 nt, synthetic construct
  source 1..19: mol_type = other RNA
ggaccgaatttacaagcag

SEQ ID NO: 1451 - RNA, 19 nt, synthetic construct
  source 1..19: mol_type = other RNA
gaccgaatttacaagcagt

SEQ ID NO: 1452 - RNA, 19 nt, synthetic construct
  source 1..19: mol_type = other RNA
accgaatttacaagcagta

SEQ ID NO: 1453 - RNA, 19 nt, synthetic construct
  source 1..19: mol_type = other RNA
ccgaatttacaagcagtat

SEQ ID NO: 1454 - RNA, 19 nt, synthetic construct
  source 1..19: mol_type = other RNA
cgaatttacaagcagtatt

SEQ ID NO: 1455 - RNA, 19 nt, synthetic construct
  source 1..19: mol_type = other RNA
gaatttacaagcagtattc

SEQ ID NO: 1456 - RNA, 19 nt, synthetic construct
  source 1..19: mol_type = other RNA
aatttacaagcagtattca

SEQ ID NO: 1457 - RNA, 19 nt, synthetic construct
  source 1..19: mol_type = other RNA
atttacaagcagtattcac

SEQ ID NO: 1458 - RNA, 19 nt, synthetic construct
  source 1..19: mol_type = other RNA
tttacaagcagtattcacc

SEQ ID NO: 1459 - RNA, 19 nt, synthetic construct
  source 1..19: mol_type = other RNA
ttacaagcagtattcacct

SEQ ID NO: 1460 - RNA, 19 nt, synthetic construct
  source 1..19: mol_type = other RNA
tacaagcagtattcaccta

SEQ ID NO: 1461 - RNA, 19 nt, synthetic construct
  source 1..19: mol_type = other RNA
acaagcagtattcacctag

SEQ ID NO: 1462 - RNA, 19 nt, synthetic construct
  source 1..19: mol_type = other RNA
caagcagtattcacctaga

SEQ ID NO: 1463 - RNA, 19 nt, synthetic construct
  source 1..19: mol_type = other RNA
aagcagtattcacctagac

SEQ ID NO: 1464 - RNA, 19 nt, synthetic construct
  source 1..19: mol_type = other RNA
agcagtattcacctagacg

SEQ ID NO: 1465 - RNA, 19 nt, synthetic construct
  source 1..19: mol_type = other RNA
gcagtattcacctagacgt

SEQ ID NO: 1466 - RNA, 19 nt, synthetic construct
  source 1..19: mol_type = other RNA
cagtattcacctagacgtc

SEQ ID NO: 1467 - RNA, 19 nt, synthetic construct
  source 1..19: mol_type = other RNA
agtattcacctagacgtcg

SEQ ID NO: 1468 - RNA, 19 nt, synthetic construct
  source 1..19: mol_type = other RNA
gtattcacctagacgtcga

SEQ ID NO: 1469 - RNA, 19 nt, synthetic construct
  source 1..19: mol_type = other RNA
tattcacctagacgtcgac

SEQ ID NO: 1470 - RNA, 19 nt, synthetic construct
  source 1..19: mol_type = other RNA
attcacctagacgtcgacc

SEQ ID NO: 1471 - RNA, 19 nt, synthetic construct
  source 1..19: mol_type = other RNA
ttcacctagacgtcgacct

SEQ ID NO: 1472 - RNA, 19 nt, synthetic construct
  source 1..19: mol_type = other RNA
tcacctagacgtcgacctg

SEQ ID NO: 1473 - RNA, 19 nt, synthetic construct
  source 1..19: mol_type = other RNA
cacctagacgtcgacctgg

SEQ ID NO: 1474 - RNA, 19 nt, synthetic construct
  source 1..19: mol_type = other RNA
acctagacgtcgacctgga

SEQ ID NO: 1475 - RNA, 19 nt, synthetic construct
  source 1..19: mol_type = other RNA
cctagacgtcgacctggag

SEQ ID NO: 1476 - RNA, 19 nt, synthetic construct
  source 1..19: mol_type = other RNA
ctagacgtcgacctggaga

SEQ ID NO: 1477 - RNA, 19 nt, synthetic construct
  source 1..19: mol_type = other RNA
tagacgtcgacctggagat

SEQ ID NO: 1478 - RNA, 19 nt, synthetic construct
  source 1..19: mol_type = other RNA
agacgtcgacctggagatc

SEQ ID NO: 1479 - RNA, 19 nt, synthetic construct
  source 1..19: mol_type = other RNA
gacgtcgacctggagatcc

SEQ ID NO: 1480 - RNA, 19 nt, synthetic construct
  source 1..19: mol_type = other RNA
acgtcgacctggagatcct

SEQ ID NO: 1481 - RNA, 19 nt, synthetic construct
  source 1..19: mol_type = other RNA
cgtcgacctggagatcctg

SEQ ID NO: 1482 - RNA, 19 nt, synthetic construct
  source 1..19: mol_type = other RNA
gtcgacctggagatcctgt

SEQ ID NO: 1483 - RNA, 19 nt, synthetic construct
  source 1..19: mol_type = other RNA
tcgacctggagatcctgtt

SEQ ID NO: 1484 - RNA, 19 nt, synthetic construct
  source 1..19: mol_type = other RNA
cgacctggagatcctgttt

SEQ ID NO: 1485 - RNA, 19 nt, synthetic construct
  source 1..19: mol_type = other RNA
gacctggagatcctgtttg

SEQ ID NO: 1486 - RNA, 19 nt, synthetic construct
  source 1..19: mol_type = other RNA
acctggagatcctgtttgc

SEQ ID NO: 1487 - RNA, 19 nt, synthetic construct
  source 1..19: mol_type = other RNA
cctggagatcctgtttgcc

SEQ ID NO: 1488 - RNA, 19 nt, synthetic construct
  source 1..19: mol_type = other RNA
ctggagatcctgtttgccc

SEQ ID NO: 1489 - RNA, 19 nt, synthetic construct
  source 1..19: mol_type = other RNA
tggagatcctgtttgccct

SEQ ID NO: 1490 - RNA, 19 nt, synthetic construct
  source 1..19: mol_type = other RNA
ggagatcctgtttgccctt

SEQ ID NO: 1491 - RNA, 19 nt, synthetic construct
  source 1..19: mol_type = other RNA
gagatcctgtttgcccttt

SEQ ID NO: 1492 - RNA, 19 nt, synthetic construct
  source 1..19: mol_type = other RNA
agatcctgtttgccctttt

SEQ ID NO: 1493 - RNA, 19 nt, synthetic construct
  source 1..19: mol_type = other RNA
gatcctgtttgcccttttt

SEQ ID NO: 1494 - RNA, 19 nt, synthetic construct
  source 1..19: mol_type = other RNA
atcctgtttgcccttttta

SEQ ID NO: 1495 - RNA, 19 nt, synthetic construct
  source 1..19: mol_type = other RNA
tcctgtttgccctttttat

SEQ ID NO: 1496 - RNA, 19 nt, synthetic construct
  source 1..19: mol_type = other RNA
cctgtttgccctttttata

SEQ ID NO: 1497 - RNA, 19 nt, synthetic construct
  source 1..19: mol_type = other RNA
ctgtttgccctttttatag

SEQ ID NO: 1498 - RNA, 19 nt, synthetic construct
  source 1..19: mol_type = other RNA
tgtttgccctttttatagt

SEQ ID NO: 1499 - RNA, 19 nt, synthetic construct
  source 1..19: mol_type = other RNA
gtttgccctttttatagtc

SEQ ID NO: 1500 - RNA, 19 nt, synthetic construct
  source 1..19: mol_type = other RNA
tttgccctttttatagtca

SEQ ID NO: 1501 - RNA, 19 nt, synthetic construct
  source 1..19: mol_type = other RNA
ttgccctttttatagtcac

SEQ ID NO: 1502 - RNA, 19 nt, synthetic construct
  source 1..19: mol_type = other RNA
tgccctttttatagtcacc

SEQ ID NO: 1503 - RNA, 19 nt, synthetic construct
  source 1..19: mol_type = other RNA
gccctttttatagtcacca

SEQ ID NO: 1504 - RNA, 19 nt, synthetic construct
  source 1..19: mol_type = other RNA
ccctttttatagtcaccaa

SEQ ID NO: 1505 - RNA, 19 nt, synthetic construct
  source 1..19: mol_type = other RNA
cctttttatagtcaccaat

SEQ ID NO: 1506 - RNA, 19 nt, synthetic construct
  source 1..19: mol_type = other RNA
ctttttatagtcaccaatt

SEQ ID NO: 1507 - RNA, 19 nt, synthetic construct
  source 1..19: mol_type = other RNA
tttttatagtcaccaatta

SEQ ID NO: 1508 - RNA, 19 nt, synthetic construct
  source 1..19: mol_type = other RNA
ttttatagtcaccaattaa

SEQ ID NO: 1509 - RNA, 19 nt, synthetic construct
  source 1..19: mol_type = other RNA
tttatagtcaccaattaag

SEQ ID NO: 1510 - RNA, 19 nt, synthetic construct
  source 1..19: mol_type = other RNA
ttatagtcaccaattaaga

SEQ ID NO: 1511 - RNA, 19 nt, synthetic construct
  source 1..19: mol_type = other RNA
tatagtcaccaattaagaa

SEQ ID NO: 1512 - RNA, 19 nt, synthetic construct
  source 1..19: mol_type = other RNA
atagtcaccaattaagaag

SEQ ID NO: 1513 - RNA, 19 nt, synthetic construct
  source 1..19: mol_type = other RNA
tagtcaccaattaagaagc

SEQ ID NO: 1514 - RNA, 19 nt, synthetic construct
  source 1..19: mol_type = other RNA
agtcaccaattaagaagca

SEQ ID NO: 1515 - RNA, 19 nt, synthetic construct
  source 1..19: mol_type = other RNA
gtcaccaattaagaagcaa

SEQ ID NO: 1516 - RNA, 19 nt, synthetic construct
  source 1..19: mol_type = other RNA
tcaccaattaagaagcaaa

SEQ ID NO: 1517 - RNA, 19 nt, synthetic construct
  source 1..19: mol_type = other RNA
caccaattaagaagcaaac

SEQ ID NO: 1518 - RNA, 19 nt, synthetic construct
  source 1..19: mol_type = other RNA
accaattaagaagcaaaca

SEQ ID NO: 1519 - RNA, 19 nt, synthetic construct
  source 1..19: mol_type = other RNA
ccaattaagaagcaaacac

SEQ ID NO: 1520 - RNA, 19 nt, synthetic construct
  source 1..19: mol_type = other RNA
caattaagaagcaaacacc

SEQ ID NO: 1521 - RNA, 19 nt, synthetic construct
  source 1..19: mol_type = other RNA
aattaagaagcaaacacct

SEQ ID NO: 1522 - RNA, 19 nt, synthetic construct
  source 1..19: mol_type = other RNA
attaagaagcaaacacctg

SEQ ID NO: 1523 - RNA, 19 nt, synthetic construct
  source 1..19: mol_type = other RNA
ttaagaagcaaacacctgg

SEQ ID NO: 1524 - RNA, 19 nt, synthetic construct
  source 1..19: mol_type = other RNA
taagaagcaaacacctggc

SEQ ID NO: 1525 - RNA, 19 nt, synthetic construct
  source 1..19: mol_type = other RNA
aagaagcaaacacctggct

SEQ ID NO: 1526 - RNA, 19 nt, synthetic construct
  source 1..19: mol_type = other RNA
agaagcaaacacctggcta

SEQ ID NO: 1527 - RNA, 19 nt, synthetic construct
  source 1..19: mol_type = other RNA
gaagcaaacacctggctat

SEQ ID NO: 1528 - RNA, 19 nt, synthetic construct
  source 1..19: mol_type = other RNA
aagcaaacacctggctatc

SEQ ID NO: 1529 - RNA, 19 nt, synthetic construct
  source 1..19: mol_type = other RNA
agcaaacacctggctatca

SEQ ID NO: 1530 - RNA, 19 nt, synthetic construct
  source 1..19: mol_type = other RNA
gcaaacacctggctatcaa

SEQ ID NO: 1531 - RNA, 19 nt, synthetic construct
  source 1..19: mol_type = other RNA
caaacacctggctatcaaa

SEQ ID NO: 1532 - RNA, 19 nt, synthetic construct
  source 1..19: mol_type = other RNA
aaacacctggctatcaaaa

SEQ ID NO: 1533 - RNA, 19 nt, synthetic construct
  source 1..19: mol_type = other RNA
aacacctggctatcaaaaa

SEQ ID NO: 1534 - RNA, 19 nt, synthetic construct
  source 1..19: mol_type = other RNA
acacctggctatcaaaaaa

SEQ ID NO: 1535 - RNA, 19 nt, synthetic construct
  source 1..19: mol_type = other RNA
cacctggctatcaaaaaaa

SEQ ID NO: 1536 - RNA, 19 nt, synthetic construct
  source 1..19: mol_type = other RNA
acctggctatcaaaaaaat

SEQ ID NO: 1537 - RNA, 19 nt, synthetic construct
  source 1..19: mol_type = other RNA
cctggctatcaaaaaaatg

SEQ ID NO: 1538 - RNA, 19 nt, synthetic construct
  source 1..19: mol_type = other RNA
ctggctatcaaaaaaatga

SEQ ID NO: 1539 - RNA, 19 nt, synthetic construct
  source 1..19: mol_type = other RNA
tggctatcaaaaaaatgaa

SEQ ID NO: 1540 - RNA, 19 nt, synthetic construct
  source 1..19: mol_type = other RNA
ggctatcaaaaaaatgaat

SEQ ID NO: 1541 - RNA, 19 nt, synthetic construct
  source 1..19: mol_type = other RNA
gctatcaaaaaaatgaatg

SEQ ID NO: 1542 - RNA, 19 nt, synthetic construct
  source 1..19: mol_type = other RNA
ctatcaaaaaaatgaatga

SEQ ID NO: 1543 - RNA, 19 nt, synthetic construct
  source 1..19: mol_type = other RNA
tatcaaaaaaatgaatgaa

SEQ ID NO: 1544 - RNA, 19 nt, synthetic construct
  source 1..19: mol_type = other RNA
atcaaaaaaatgaatgaaa

SEQ ID NO: 1545 - RNA, 19 nt, synthetic construct
  source 1..19: mol_type = other RNA
tcaaaaaaatgaatgaaat

SEQ ID NO: 1546 - RNA, 19 nt, synthetic construct
  source 1..19: mol_type = other RNA
caaaaaaatgaatgaaatt

SEQ ID NO: 1547 - RNA, 19 nt, synthetic construct
  source 1..19: mol_type = other RNA
aaaaaaatgaatgaaattc

SEQ ID NO: 1548 - RNA, 19 nt, synthetic construct
  source 1..19: mol_type = other RNA
aaaaaatgaatgaaattca

SEQ ID NO: 1549 - RNA, 19 nt, synthetic construct
  source 1..19: mol_type = other RNA
aaaaatgaatgaaattcag

SEQ ID NO: 1550 - RNA, 19 nt, synthetic construct
  source 1..19: mol_type = other RNA
aaaatgaatgaaattcaga

SEQ ID NO: 1551 - RNA, 19 nt, synthetic construct
  source 1..19: mol_type = other RNA
aaatgaatgaaattcagaa

SEQ ID NO: 1552 - RNA, 19 nt, synthetic construct
  source 1..19: mol_type = other RNA
aatgaatgaaattcagaaa

SEQ ID NO: 1553 - RNA, 19 nt, synthetic construct
  source 1..19: mol_type = other RNA
atgaatgaaattcagaaaa

SEQ ID NO: 1554 - RNA, 19 nt, synthetic construct
  source 1..19: mol_type = other RNA
tgaatgaaattcagaaaaa

SEQ ID NO: 1555 - RNA, 19 nt, synthetic construct
  source 1..19: mol_type = other RNA
gaatgaaattcagaaaaat

SEQ ID NO: 1556 - RNA, 19 nt, synthetic construct
  source 1..19: mol_type = other RNA
aatgaaattcagaaaaata

SEQ ID NO: 1557 - RNA, 19 nt, synthetic construct
  source 1..19: mol_type = other RNA
atgaaattcagaaaaatat

SEQ ID NO: 1558 - RNA, 19 nt, synthetic construct
  source 1..19: mol_type = other RNA
tgaaattcagaaaaatatc

SEQ ID NO: 1559 - RNA, 19 nt, synthetic construct
  source 1..19: mol_type = other RNA
gaaattcagaaaaatatcg

SEQ ID NO: 1560 - RNA, 19 nt, synthetic construct
  source 1..19: mol_type = other RNA
aaattcagaaaaatatcga

SEQ ID NO: 1561 - RNA, 19 nt, synthetic construct
  source 1..19: mol_type = other RNA
aattcagaaaaatatcgat

SEQ ID NO: 1562 - RNA, 19 nt, synthetic construct
  source 1..19: mol_type = other RNA
attcagaaaaatatcgatg

SEQ ID NO: 1563 - RNA, 19 nt, synthetic construct
  source 1..19: mol_type = other RNA
ttcagaaaaatatcgatgg

SEQ ID NO: 1564 - RNA, 19 nt, synthetic construct
  source 1..19: mol_type = other RNA
tcagaaaaatatcgatgga

SEQ ID NO: 1565 - RNA, 19 nt, synthetic construct
  source 1..19: mol_type = other RNA
cagaaaaatatcgatggat

SEQ ID NO: 1566 - RNA, 19 nt, synthetic construct
  source 1..19: mol_type = other RNA
agaaaaatatcgatggatg

SEQ ID NO: 1567 - RNA, 19 nt, synthetic construct
  source 1..19: mol_type = other RNA
gaaaaatatcgatggatgg

SEQ ID NO: 1568 - RNA, 19 nt, synthetic construct
  source 1..19: mol_type = other RNA
aaaaatatcgatggatggg

SEQ ID NO: 1569 - RNA, 19 nt, synthetic construct
  source 1..19: mol_type = other RNA
aaaatatcgatggatggga

SEQ ID NO: 1570 - RNA, 19 nt, synthetic construct
  source 1..19: mol_type = other RNA
aaatatcgatggatgggaa

SEQ ID NO: 1571 - RNA, 19 nt, synthetic construct
  source 1..19: mol_type = other RNA
aatatcgatggatgggaag

SEQ ID NO: 1572 - RNA, 19 nt, synthetic construct
  source 1..19: mol_type = other RNA
atatcgatggatgggaagg

SEQ ID NO: 1573 - RNA, 19 nt, synthetic construct
  source 1..19: mol_type = other RNA
tatcgatggatgggaaggc

SEQ ID NO: 1574 - RNA, 19 nt, synthetic construct
  source 1..19: mol_type = other RNA
atcgatggatgggaaggca

SEQ ID NO: 1575 - RNA, 19 nt, synthetic construct
  source 1..19: mol_type = other RNA
tcgatggatgggaaggcaa

SEQ ID NO: 1576 - RNA, 19 nt, synthetic construct
  source 1..19: mol_type = other RNA
cgatggatgggaaggcaaa

SEQ ID NO: 1577 - RNA, 19 nt, synthetic construct
  source 1..19: mol_type = other RNA
gatggatgggaaggcaaag

SEQ ID NO: 1578 - RNA, 19 nt, synthetic construct
  source 1..19: mol_type = other RNA
atggatgggaaggcaaaga

SEQ ID NO: 1579 - RNA, 19 nt, synthetic construct
  source 1..19: mol_type = other RNA
tggatgggaaggcaaagat

SEQ ID NO: 1580 - RNA, 19 nt, synthetic construct
  source 1..19: mol_type = other RNA
ggatgggaaggcaaagata

SEQ ID NO: 1581 - RNA, 19 nt, synthetic construct
  source 1..19: mol_type = other RNA
gatgggaaggcaaagatat

SEQ ID NO: 1582 - RNA, 19 nt, synthetic construct
  source 1..19: mol_type = other RNA
atgggaaggcaaagatatt

SEQ ID NO: 1583 - RNA, 19 nt, synthetic construct
  source 1..19: mol_type = other RNA
tgggaaggcaaagatattg

SEQ ID NO: 1584 - RNA, 19 nt, synthetic construct
  source 1..19: mol_type = other RNA
gggaaggcaaagatattgg

SEQ ID NO: 1585 - RNA, 19 nt, synthetic construct
  source 1..19: mol_type = other RNA
ggaaggcaaagatattgga

SEQ ID NO: 1586 - RNA, 19 nt, synthetic construct
  source 1..19: mol_type = other RNA
gaaggcaaagatattggac

SEQ ID NO: 1587 - RNA, 19 nt, synthetic construct
  source 1..19: mol_type = other RNA
aaggcaaagatattggaca

SEQ ID NO: 1588 - RNA, 19 nt, synthetic construct
  source 1..19: mol_type = other RNA
aggcaaagatattggacag

SEQ ID NO: 1589 - RNA, 19 nt, synthetic construct
  source 1..19: mol_type = other RNA
ggcaaagatattggacagt

SEQ ID NO: 1590 - RNA, 19 nt, synthetic construct
  source 1..19: mol_type = other RNA
gcaaagatattggacagtg

SEQ ID NO: 1591 - RNA, 19 nt, synthetic construct
  source 1..19: mol_type = other RNA
caaagatattggacagtgt

SEQ ID NO: 1592 - RNA, 19 nt, synthetic construct
  source 1..19: mol_type = other RNA
aaagatattggacagtgtt

SEQ ID NO: 1593 - RNA, 19 nt, synthetic construct
  source 1..19: mol_type = other RNA
aagatattggacagtgttg

SEQ ID NO: 1594 - RNA, 19 nt, synthetic construct
  source 1..19: mol_type = other RNA
agatattggacagtgttgt

SEQ ID NO: 1595 - RNA, 19 nt, synthetic construct
  source 1..19: mol_type = other RNA
gatattggacagtgttgta

SEQ ID NO: 1596 - RNA, 19 nt, synthetic construct
  source 1..19: mol_type = other RNA
atattggacagtgttgtaa

SEQ ID NO: 1597 - RNA, 19 nt, synthetic construct
  source 1..19: mol_type = other RNA
tattggacagtgttgtaat

SEQ ID NO: 1598 - RNA, 19 nt, synthetic construct
  source 1..19: mol_type = other RNA
attggacagtgttgtaatg

SEQ ID NO: 1599 - RNA, 19 nt, synthetic construct
  source 1..19: mol_type = other RNA
ttggacagtgttgtaatga

SEQ ID NO: 1600 - RNA, 19 nt, synthetic construct
  source 1..19: mol_type = other RNA
tggacagtgttgtaatgaa

SEQ ID NO: 1601 - RNA, 19 nt, synthetic construct
  source 1..19: mol_type = other RNA
ggacagtgttgtaatgaat

SEQ ID NO: 1602 - RNA, 19 nt, synthetic construct
  source 1..19: mol_type = other RNA
gacagtgttgtaatgaatt

SEQ ID NO: 1603 - RNA, 19 nt, synthetic construct
  source 1..19: mol_type = other RNA
acagtgttgtaatgaattc

SEQ ID NO: 1604 - RNA, 19 nt, synthetic construct
  source 1..19: mol_type = other RNA
cagtgttgtaatgaattca

SEQ ID NO: 1605 - RNA, 19 nt, synthetic construct
  source 1..19: mol_type = other RNA
agtgttgtaatgaattcat

SEQ ID NO: 1606 - RNA, 19 nt, synthetic construct
  source 1..19: mol_type = other RNA
gtgttgtaatgaattcatt

SEQ ID NO: 1607 - RNA, 19 nt, synthetic construct
  source 1..19: mol_type = other RNA
tgttgtaatgaattcatta

SEQ ID NO: 1608 - RNA, 19 nt, synthetic construct
  source 1..19: mol_type = other RNA
gttgtaatgaattcattat

SEQ ID NO: 1609 - RNA, 19 nt, synthetic construct
  source 1..19: mol_type = other RNA
ttgtaatgaattcattatg

SEQ ID NO: 1610 - RNA, 19 nt, synthetic construct
  source 1..19: mol_type = other RNA
tgtaatgaattcattatgg

SEQ ID NO: 1611 - RNA, 19 nt, synthetic construct
  source 1..19: mol_type = other RNA
gtaatgaattcattatgga

SEQ ID NO: 1612 - RNA, 19 nt, synthetic construct
  source 1..19: mol_type = other RNA
taatgaattcattatggag

SEQ ID NO: 1613 - RNA, 19 nt, synthetic construct
  source 1..19: mol_type = other RNA
aatgaattcattatggagg

SEQ ID NO: 1614 - RNA, 19 nt, synthetic construct
  source 1..19: mol_type = other RNA
atgaattcattatggaggg

SEQ ID NO: 1615 - RNA, 19 nt, synthetic construct
  source 1..19: mol_type = other RNA
tgaattcattatggaggga

SEQ ID NO: 1616 - RNA, 19 nt, synthetic construct
  source 1..19: mol_type = other RNA
gaattcattatggagggac

SEQ ID NO: 1617 - RNA, 19 nt, synthetic construct
  source 1..19: mol_type = other RNA
aattcattatggagggacc

SEQ ID NO: 1618 - RNA, 19 nt, synthetic construct
  source 1..19: mol_type = other RNA
attcattatggagggacca

SEQ ID NO: 1619 - RNA, 19 nt, synthetic construct
  source 1..19: mol_type = other RNA
ttcattatggagggaccat

SEQ ID NO: 1620 - RNA, 19 nt, synthetic construct
  source 1..19: mol_type = other RNA
tcattatggagggaccatt

SEQ ID NO: 1621 - RNA, 19 nt, synthetic construct
  source 1..19: mol_type = other RNA
cattatggagggaccattg

SEQ ID NO: 1622 - RNA, 19 nt, synthetic construct
  source 1..19: mol_type = other RNA
attatggagggaccattga

SEQ ID NO: 1623 - RNA, 19 nt, synthetic construct
  source 1..19: mol_type = other RNA
ttatggagggaccattgac

SEQ ID NO: 1624 - RNA, 19 nt, synthetic construct
  source 1..19: mol_type = other RNA
tatggagggaccattgaca

SEQ ID NO: 1625 - RNA, 19 nt, synthetic construct
  source 1..19: mol_type = other RNA
atggagggaccattgacaa

SEQ ID NO: 1626 - RNA, 19 nt, synthetic construct
  source 1..19: mol_type = other RNA
tggagggaccattgacaag

SEQ ID NO: 1627 - RNA, 19 nt, synthetic construct
  source 1..19: mol_type = other RNA
ggagggaccattgacaaga

SEQ ID NO: 1628 - RNA, 19 nt, synthetic construct
  source 1..19: mol_type = other RNA
gagggaccattgacaagaa

SEQ ID NO: 1629 - RNA, 19 nt, synthetic construct
  source 1..19: mol_type = other RNA
agggaccattgacaagaat

SEQ ID NO: 1630 - RNA, 19 nt, synthetic construct
  source 1..19: mol_type = other RNA
gggaccattgacaagaatc

SEQ ID NO: 1631 - RNA, 19 nt, synthetic construct
  source 1..19: mol_type = other RNA
ggaccattgacaagaatcg

SEQ ID NO: 1632 - RNA, 19 nt, synthetic construct
  source 1..19: mol_type = other RNA
gaccattgacaagaatcgg

SEQ ID NO: 1633 - RNA, 19 nt, synthetic construct
  source 1..19: mol_type = other RNA
accattgacaagaatcggt

SEQ ID NO: 1634 - RNA, 19 nt, synthetic construct
  source 1..19: mol_type = other RNA
ccattgacaagaatcggtg

SEQ ID NO: 1635 - RNA, 19 nt, synthetic construct
  source 1..19: mol_type = other RNA
cattgacaagaatcggtgc

SEQ ID NO: 1636 - RNA, 19 nt, synthetic construct
  source 1..19: mol_type = other RNA
attgacaagaatcggtgcc

SEQ ID NO: 1637 - RNA, 19 nt, synthetic construct
  source 1..19: mol_type = other RNA
ttgacaagaatcggtgcca

SEQ ID NO: 1638 - RNA, 19 nt, synthetic construct
  source 1..19: mol_type = other RNA
tgacaagaatcggtgccaa

SEQ ID NO: 1639 - RNA, 19 nt, synthetic construct
  source 1..19: mol_type = other RNA
gacaagaatcggtgccaaa

SEQ ID NO: 1640 - RNA, 19 nt, synthetic construct
  source 1..19: mol_type = other RNA
acaagaatcggtgccaaac

SEQ ID NO: 1641 - RNA, 19 nt, synthetic construct
  source 1..19: mol_type = other RNA
caagaatcggtgccaaaca

SEQ ID NO: 1642 - RNA, 19 nt, synthetic construct
  source 1..19: mol_type = other RNA
aagaatcggtgccaaacat

SEQ ID NO: 1643 - RNA, 19 nt, synthetic construct
  source 1..19: mol_type = other RNA
agaatcggtgccaaacatg

SEQ ID NO: 1644 - RNA, 19 nt, synthetic construct
  source 1..19: mol_type = other RNA
gaatcggtgccaaacatga

SEQ ID NO: 1645 - RNA, 19 nt, synthetic construct
  source 1..19: mol_type = other RNA
aatcggtgccaaacatgaa

SEQ ID NO: 1646 - RNA, 19 nt, synthetic construct
  source 1..19: mol_type = other RNA
atcggtgccaaacatgaac

SEQ ID NO: 1647 - RNA, 19 nt, synthetic construct
  source 1..19: mol_type = other RNA
tcggtgccaaacatgaacg

SEQ ID NO: 1648 - RNA, 19 nt, synthetic construct
  source 1..19: mol_type = other RNA
cggtgccaaacatgaacgg

SEQ ID NO: 1649 - RNA, 19 nt, synthetic construct
  source 1..19: mol_type = other RNA
ggtgccaaacatgaacggc

SEQ ID NO: 1650 - RNA, 19 nt, synthetic construct
  source 1..19: mol_type = other RNA
gtgccaaacatgaacggca

SEQ ID NO: 1651 - RNA, 19 nt, synthetic construct
  source 1..19: mol_type = other RNA
tgccaaacatgaacggcat

SEQ ID NO: 1652 - RNA, 19 nt, synthetic construct
  source 1..19: mol_type = other RNA
gccaaacatgaacggcata

SEQ ID NO: 1653 - RNA, 19 nt, synthetic construct
  source 1..19: mol_type = other RNA
ccaaacatgaacggcatat

SEQ ID NO: 1654 - RNA, 19 nt, synthetic construct
  source 1..19: mol_type = other RNA
caaacatgaacggcatatt

SEQ ID NO: 1655 - RNA, 19 nt, synthetic construct
  source 1..19: mol_type = other RNA
aaacatgaacggcatattt

SEQ ID NO: 1656 - RNA, 19 nt, synthetic construct
  source 1..19: mol_type = other RNA
aacatgaacggcatatttt

SEQ ID NO: 1657 - RNA, 19 nt, synthetic construct
  source 1..19: mol_type = other RNA
acatgaacggcatattttt

SEQ ID NO: 1658 - RNA, 19 nt, synthetic construct
  source 1..19: mol_type = other RNA
catgaacggcatatttttc

SEQ ID NO: 1659 - RNA, 19 nt, synthetic construct
  source 1..19: mol_type = other RNA
atgaacggcatatttttct

SEQ ID NO: 1660 - RNA, 19 nt, synthetic construct
  source 1..19: mol_type = other RNA
tgaacggcatatttttctg

SEQ ID NO: 1661 - RNA, 19 nt, synthetic construct
  source 1..19: mol_type = other RNA
gaacggcatatttttctgt

SEQ ID NO: 1662 - RNA, 19 nt, synthetic construct
  source 1..19: mol_type = other RNA
aacggcatatttttctgtt

SEQ ID NO: 1663 - RNA, 19 nt, synthetic construct
  source 1..19: mol_type = other RNA
acggcatatttttctgttt

SEQ ID NO: 1664 - RNA, 19 nt, synthetic construct
  source 1..19: mol_type = other RNA
cggcatatttttctgtttg

SEQ ID NO: 1665 - RNA, 19 nt, synthetic construct
  source 1..19: mol_type = other RNA
ggcatatttttctgtttga

SEQ ID NO: 1666 - RNA, 19 nt, synthetic construct
  source 1..19: mol_type = other RNA
gcatatttttctgtttgat

SEQ ID NO: 1667 - RNA, 19 nt, synthetic construct
  source 1..19: mol_type = other RNA
catatttttctgtttgatg

SEQ ID NO: 1668 - RNA, 19 nt, synthetic construct
  source 1..19: mol_type = other RNA
atatttttctgtttgatgg

SEQ ID NO: 1669 - RNA, 19 nt, synthetic construct
  source 1..19: mol_type = other RNA
tatttttctgtttgatggc

SEQ ID NO: 1670 - RNA, 19 nt, synthetic construct
  source 1..19: mol_type = other RNA
atttttctgtttgatggct

SEQ ID NO: 1671 - RNA, 19 nt, synthetic construct
  source 1..19: mol_type = other RNA
tttttctgtttgatggctt

SEQ ID NO: 1672 - RNA, 19 nt, synthetic construct
  source 1..19: mol_type = other RNA
ttttctgtttgatggctta

SEQ ID NO: 1673 - RNA, 19 nt, synthetic construct
  source 1..19: mol_type = other RNA
tttctgtttgatggcttaa

SEQ ID NO: 1674 - RNA, 19 nt, synthetic construct
  source 1..19: mol_type = other RNA
ttctgtttgatggcttaat

SEQ ID NO: 1675 - RNA, 19 nt, synthetic construct
  source 1..19: mol_type = other RNA
tctgtttgatggcttaatg

SEQ ID NO: 1676 - RNA, 19 nt, synthetic construct
  source 1..19: mol_type = other RNA
ctgtttgatggcttaatga

SEQ ID NO: 1677 - RNA, 19 nt, synthetic construct
  source 1..19: mol_type = other RNA
tgtttgatggcttaatgat

SEQ ID NO: 1678 - RNA, 19 nt, synthetic construct
  source 1..19: mol_type = other RNA
gtttgatggcttaatgatc

SEQ ID NO: 1679 - RNA, 19 nt, synthetic construct
  source 1..19: mol_type = other RNA
tttgatggcttaatgatca

SEQ ID NO: 1680 - RNA, 19 nt, synthetic construct
  source 1..19: mol_type = other RNA
ttgatggcttaatgatcag

SEQ ID NO: 1681 - RNA, 19 nt, synthetic construct
  source 1..19: mol_type = other RNA
tgatggcttaatgatcagt

SEQ ID NO: 1682 - RNA, 19 nt, synthetic construct
  source 1..19: mol_type = other RNA
gatggcttaatgatcagtt

SEQ ID NO: 1683 - RNA, 19 nt, synthetic construct
  source 1..19: mol_type = other RNA
atggcttaatgatcagttg

SEQ ID NO: 1684 - RNA, 19 nt, synthetic construct
  source 1..19: mol_type = other RNA
tggcttaatgatcagttgt

SEQ ID NO: 1685 - RNA, 19 nt, synthetic construct
  source 1..19: mol_type = other RNA
ggcttaatgatcagttgta

SEQ ID NO: 1686 - RNA, 19 nt, synthetic construct
  source 1..19: mol_type = other RNA
gcttaatgatcagttgtaa

SEQ ID NO: 1687 - RNA, 19 nt, synthetic construct
  source 1..19: mol_type = other RNA
cttaatgatcagttgtaaa

SEQ ID NO: 1688 - RNA, 19 nt, synthetic construct
  source 1..19: mol_type = other RNA
ttaatgatcagttgtaaac

SEQ ID NO: 1689 - RNA, 19 nt, synthetic construct
  source 1..19: mol_type = other RNA
taatgatcagttgtaaacc

SEQ ID NO: 1690 - RNA, 19 nt, synthetic construct
  source 1..19: mol_type = other RNA
aatgatcagttgtaaacct

SEQ ID NO: 1691 - RNA, 19 nt, synthetic construct
  source 1..19: mol_type = other RNA
atgatcagttgtaaaccta

SEQ ID NO: 1692 - RNA, 19 nt, synthetic construct
  source 1..19: mol_type = other RNA
tgatcagttgtaaacctaa

SEQ ID NO: 1693 - RNA, 19 nt, synthetic construct
  source 1..19: mol_type = other RNA
gatcagttgtaaacctaat

SEQ ID NO: 1694 - RNA, 19 nt, synthetic construct
  source 1..19: mol_type = other RNA
atcagttgtaaacctaatc

SEQ ID NO: 1695 - RNA, 19 nt, synthetic construct
  source 1..19: mol_type = other RNA
tcagttgtaaacctaatca

SEQ ID NO: 1696 - RNA, 19 nt, synthetic construct
  source 1..19: mol_type = other RNA
cagttgtaaacctaatcat

SEQ ID NO: 1697 - RNA, 19 nt, synthetic construct
  source 1..19: mol_type = other RNA
agttgtaaacctaatcatg

SEQ ID NO: 1698 - RNA, 19 nt, synthetic construct
  source 1..19: mol_type = other RNA
gttgtaaacctaatcatgg

SEQ ID NO: 1699 - RNA, 19 nt, synthetic construct
  source 1..19: mol_type = other RNA
ttgtaaacctaatcatggc

SEQ ID NO: 1700 - RNA, 19 nt, synthetic construct
  source 1..19: mol_type = other RNA
tgtaaacctaatcatggcc

SEQ ID NO: 1701 - RNA, 19 nt, synthetic construct
  source 1..19: mol_type = other RNA
gtaaacctaatcatggcca

SEQ ID NO: 1702 - RNA, 19 nt, synthetic construct
  source 1..19: mol_type = other RNA
taaacctaatcatggccag

SEQ ID NO: 1703 - RNA, 19 nt, synthetic construct
  source 1..19: mol_type = other RNA
aaacctaatcatggccaga

SEQ ID NO: 1704 - RNA, 19 nt, synthetic construct
  source 1..19: mol_type = other RNA
aacctaatcatggccagac

SEQ ID NO: 1705 - RNA, 19 nt, synthetic construct
  source 1..19: mol_type = other RNA
acctaatcatggccagact

SEQ ID NO: 1706 - RNA, 19 nt, synthetic construct
  source 1..19: mol_type = other RNA
cctaatcatggccagactc

SEQ ID NO: 1707 - RNA, 19 nt, synthetic construct
  source 1..19: mol_type = other RNA
ctaatcatggccagactcg

SEQ ID NO: 1708 - RNA, 19 nt, synthetic construct
  source 1..19: mol_type = other RNA
taatcatggccagactcgg

SEQ ID NO: 1709 - RNA, 19 nt, synthetic construct
  source 1..19: mol_type = other RNA
aatcatggccagactcggc

SEQ ID NO: 1710 - RNA, 19 nt, synthetic construct
  source 1..19: mol_type = other RNA
atcatggccagactcggct

SEQ ID NO: 1711 - RNA, 19 nt, synthetic construct
  source 1..19: mol_type = other RNA
tcatggccagactcggctt

SEQ ID NO: 1712 - RNA, 19 nt, synthetic construct
  source 1..19: mol_type = other RNA
catggccagactcggcttc

SEQ ID NO: 1713 - RNA, 19 nt, synthetic construct
  source 1..19: mol_type = other RNA
atggccagactcggcttcc

SEQ ID NO: 1714 - RNA, 19 nt, synthetic construct
  source 1..19: mol_type = other RNA
tggccagactcggcttcca

SEQ ID NO: 1715 - RNA, 19 nt, synthetic construct
  source 1..19: mol_type = other RNA
ggccagactcggcttccag

SEQ ID NO: 1716 - RNA, 19 nt, synthetic construct
  source 1..19: mol_type = other RNA
gccagactcggcttccagg

SEQ ID NO: 1717 - RNA, 19 nt, synthetic construct
  source 1..19: mol_type = other RNA
ccagactcggcttccaggt

SEQ ID NO: 1718 - RNA, 19 nt, synthetic construct
  source 1..19: mol_type = other RNA
cagactcggcttccaggtt

SEQ ID NO: 1719 - RNA, 19 nt, synthetic construct
  source 1..19: mol_type = other RNA
agactcggcttccaggtta

SEQ ID NO: 1720 - RNA, 19 nt, synthetic construct
  source 1..19: mol_type = other RNA
gactcggcttccaggttac

SEQ ID NO: 1721 - RNA, 19 nt, synthetic construct
  source 1..19: mol_type = other RNA
actcggcttccaggttaca

SEQ ID NO: 1722 - RNA, 19 nt, synthetic construct
  source 1..19: mol_type = other RNA
ctcggcttccaggttacag

SEQ ID NO: 1723 - RNA, 19 nt, synthetic construct
  source 1..19: mol_type = other RNA
tcggcttccaggttacagt

SEQ ID NO: 1724 - RNA, 19 nt, synthetic construct
  source 1..19: mol_type = other RNA
cggcttccaggttacagta

SEQ ID NO: 1725 - RNA, 19 nt, synthetic construct
  source 1..19: mol_type = other RNA
ggcttccaggttacagtag

SEQ ID NO: 1726 - RNA, 19 nt, synthetic construct
  source 1..19: mol_type = other RNA
gcttccaggttacagtagt

SEQ ID NO: 1727 - RNA, 19 nt, synthetic construct
  source 1..19: mol_type = other RNA
cttccaggttacagtagtg

SEQ ID NO: 1728 - RNA, 19 nt, synthetic construct
  source 1..19: mol_type = other RNA
ttccaggttacagtagtgc

SEQ ID NO: 1729 - RNA, 19 nt, synthetic construct
  source 1..19: mol_type = other RNA
tccaggttacagtagtgca

SEQ ID NO: 1730 - RNA, 19 nt, synthetic construct
  source 1..19: mol_type = other RNA
ccaggttacagtagtgcag

SEQ ID NO: 1731 - RNA, 19 nt, synthetic construct
  source 1..19: mol_type = other RNA
caggttacagtagtgcaga

SEQ ID NO: 1732 - RNA, 19 nt, synthetic construct
  source 1..19: mol_type = other RNA
aggttacagtagtgcagaa

SEQ ID NO: 1733 - RNA, 19 nt, synthetic construct
  source 1..19: mol_type = other RNA
ggttacagtagtgcagaat

SEQ ID NO: 1734 - RNA, 19 nt, synthetic construct
  source 1..19: mol_type = other RNA
gttacagtagtgcagaata

SEQ ID NO: 1735 - RNA, 19 nt, synthetic construct
  source 1..19: mol_type = other RNA
ttacagtagtgcagaatac

SEQ ID NO: 1736 - RNA, 19 nt, synthetic construct
  source 1..19: mol_type = other RNA
tacagtagtgcagaataca

SEQ ID NO: 1737 - RNA, 19 nt, synthetic construct
  source 1..19: mol_type = other RNA
acagtagtgcagaatacag

SEQ ID NO: 1738 - RNA, 19 nt, synthetic construct
  source 1..19: mol_type = other RNA
cagtagtgcagaatacagg

SEQ ID NO: 1739 - RNA, 19 nt, synthetic construct
  source 1..19: mol_type = other RNA
agtagtgcagaatacaggt

SEQ ID NO: 1740 - RNA, 19 nt, synthetic construct
  source 1..19: mol_type = other RNA
gtagtgcagaatacaggtt

SEQ ID NO: 1741 - RNA, 19 nt, synthetic construct
  source 1..19: mol_type = other RNA
tagtgcagaatacaggtta

SEQ ID NO: 1742 - RNA, 19 nt, synthetic construct
  source 1..19: mol_type = other RNA
agtgcagaatacaggttaa

SEQ ID NO: 1743 - RNA, 19 nt, synthetic construct
  source 1..19: mol_type = other RNA
gtgcagaatacaggttaaa

SEQ ID NO: 1744 - RNA, 19 nt, synthetic construct
  source 1..19: mol_type = other RNA
tgcagaatacaggttaaaa

SEQ ID NO: 1745 - RNA, 19 nt, synthetic construct
  source 1..19: mol_type = other RNA
gcagaatacaggttaaaag

SEQ ID NO: 1746 - RNA, 19 nt, synthetic construct
  source 1..19: mol_type = other RNA
cagaatacaggttaaaaga

SEQ ID NO: 1747 - RNA, 19 nt, synthetic construct
  source 1..19: mol_type = other RNA
agaatacaggttaaaagaa

SEQ ID NO: 1748 - RNA, 19 nt, synthetic construct
  source 1..19: mol_type = other RNA
gaatacaggttaaaagaaa

SEQ ID NO: 1749 - RNA, 19 nt, synthetic construct
  source 1..19: mol_type = other RNA
aatacaggttaaaagaaaa

SEQ ID NO: 1750 - RNA, 19 nt, synthetic construct
  source 1..19: mol_type = other RNA
atacaggttaaaagaaaaa

SEQ ID NO: 1751 - RNA, 19 nt, synthetic construct
  source 1..19: mol_type = other RNA
tacaggttaaaagaaaaat

SEQ ID NO: 1752 - RNA, 19 nt, synthetic construct
  source 1..19: mol_type = other RNA
acaggttaaaagaaaaatt

SEQ ID NO: 1753 - RNA, 19 nt, synthetic construct
  source 1..19: mol_type = other RNA
caggttaaaagaaaaattt

SEQ ID NO: 1754 - RNA, 19 nt, synthetic construct
  source 1..19: mol_type = other RNA
aggttaaaagaaaaatttg

SEQ ID NO: 1755 - RNA, 19 nt, synthetic construct
  source 1..19: mol_type = other RNA
ggttaaaagaaaaatttgt

SEQ ID NO: 1756 - RNA, 19 nt, synthetic construct
  source 1..19: mol_type = other RNA
gttaaaagaaaaatttgtc

SEQ ID NO: 1757 - RNA, 19 nt, synthetic construct
  source 1..19: mol_type = other RNA
ttaaaagaaaaatttgtca

SEQ ID NO: 1758 - RNA, 19 nt, synthetic construct
  source 1..19: mol_type = other RNA
taaaagaaaaatttgtcat

SEQ ID NO: 1759 - RNA, 19 nt, synthetic construct
  source 1..19: mol_type = other RNA
aaaagaaaaatttgtcatg

SEQ ID NO: 1760 - RNA, 19 nt, synthetic construct
  source 1..19: mol_type = other RNA
aaagaaaaatttgtcatga

SEQ ID NO: 1761 - RNA, 19 nt, synthetic construct
  source 1..19: mol_type = other RNA
aagaaaaatttgtcatgag

SEQ ID NO: 1762 - RNA, 19 nt, synthetic construct
  source 1..19: mol_type = other RNA
agaaaaatttgtcatgagg

SEQ ID NO: 1763 - RNA, 19 nt, synthetic construct
  source 1..19: mol_type = other RNA
gaaaaatttgtcatgagga

SEQ ID NO: 1764 - RNA, 19 nt, synthetic construct
  source 1..19: mol_type = other RNA
aaaaatttgtcatgaggaa

SEQ ID NO: 1765 - RNA, 19 nt, synthetic construct
  source 1..19: mol_type = other RNA
aaaatttgtcatgaggaaa

SEQ ID NO: 1766 - RNA, 19 nt, synthetic construct
  source 1..19: mol_type = other RNA
aaatttgtcatgaggaaaa

SEQ ID NO: 1767 - RNA, 19 nt, synthetic construct
  source 1..19: mol_type = other RNA
aatttgtcatgaggaaaat

SEQ ID NO: 1768 - RNA, 19 nt, synthetic construct
  source 1..19: mol_type = other RNA
atttgtcatgaggaaaata

SEQ ID NO: 1769 - RNA, 19 nt, synthetic construct
  source 1..19: mol_type = other RNA
tttgtcatgaggaaaatac

SEQ ID NO: 1770 - RNA, 19 nt, synthetic construct
  source 1..19: mol_type = other RNA
ttgtcatgaggaaaataca

SEQ ID NO: 1771 - RNA, 19 nt, synthetic construct
  source 1..19: mol_type = other RNA
tgtcatgaggaaaatacaa

SEQ ID NO: 1772 - RNA, 19 nt, synthetic construct
  source 1..19: mol_type = other RNA
gtcatgaggaaaatacaaa

SEQ ID NO: 1773 - RNA, 19 nt, synthetic construct
  source 1..19: mol_type = other RNA
tcatgaggaaaatacaaat

SEQ ID NO: 1774 - RNA, 19 nt, synthetic construct
  source 1..19: mol_type = other RNA
catgaggaaaatacaaatt

SEQ ID NO: 1775 - RNA, 19 nt, synthetic construct
  source 1..19: mol_type = other RNA
atgaggaaaatacaaattt

SEQ ID NO: 1776 - RNA, 19 nt, synthetic construct
  source 1..19: mol_type = other RNA
tgaggaaaatacaaatttg

SEQ ID NO: 1777 - RNA, 19 nt, synthetic construct
  source 1..19: mol_type = other RNA
gaggaaaatacaaatttgt

SEQ ID NO: 1778 - RNA, 19 nt, synthetic construct
  source 1..19: mol_type = other RNA
aggaaaatacaaatttgtg

SEQ ID NO: 1779 - RNA, 19 nt, synthetic construct
  source 1..19: mol_type = other RNA
ggaaaatacaaatttgtga

SEQ ID NO: 1780 - RNA, 19 nt, synthetic construct
  source 1..19: mol_type = other RNA
gaaaatacaaatttgtgat

SEQ ID NO: 1781 - RNA, 19 nt, synthetic construct
  source 1..19: mol_type = other RNA
aaaatacaaatttgtgata

SEQ ID NO: 1782 - RNA, 19 nt, synthetic construct
  source 1..19: mol_type = other RNA
aaatacaaatttgtgataa

SEQ ID NO: 1783 - RNA, 19 nt, synthetic construct
  source 1..19: mol_type = other RNA
aatacaaatttgtgataaa

SEQ ID NO: 1784 - RNA, 19 nt, synthetic construct
  source 1..19: mol_type = other RNA
atacaaatttgtgataaag

SEQ ID NO: 1785 - RNA, 19 nt, synthetic construct
  source 1..19: mol_type = other RNA
tacaaatttgtgataaaga

SEQ ID NO: 1786 - RNA, 19 nt, synthetic construct
  source 1..19: mol_type = other RNA
acaaatttgtgataaagaa

SEQ ID NO: 1787 - RNA, 19 nt, synthetic construct
  source 1..19: mol_type = other RNA
caaatttgtgataaagaag

SEQ ID NO: 1788 - RNA, 19 nt, synthetic construct
  source 1..19: mol_type = other RNA
aaatttgtgataaagaaga

SEQ ID NO: 1789 - RNA, 19 nt, synthetic construct
  source 1..19: mol_type = other RNA
aatttgtgataaagaagat

SEQ ID NO: 1790 - RNA, 19 nt, synthetic construct
  source 1..19: mol_type = other RNA
atttgtgataaagaagata

SEQ ID NO: 1791 - RNA, 19 nt, synthetic construct
  source 1..19: mol_type = other RNA
tttgtgataaagaagatac

SEQ ID NO: 1792 - RNA, 19 nt, synthetic construct
  source 1..19: mol_type = other RNA
ttgtgataaagaagatact

SEQ ID NO: 1793 - RNA, 19 nt, synthetic construct
  source 1..19: mol_type = other RNA
tgtgataaagaagatactt

SEQ ID NO: 1794 - RNA, 19 nt, synthetic construct
  source 1..19: mol_type = other RNA
gtgataaagaagatacttg

SEQ ID NO: 1795 - RNA, 19 nt, synthetic construct
  source 1..19: mol_type = other RNA
tgataaagaagatacttgt

SEQ ID NO: 1796 - RNA, 19 nt, synthetic construct
  source 1..19: mol_type = other RNA
gataaagaagatacttgtg

SEQ ID NO: 1797 - RNA, 19 nt, synthetic construct
  source 1..19: mol_type = other RNA
ataaagaagatacttgtga

SEQ ID NO: 1798 - RNA, 19 nt, synthetic construct
  source 1..19: mol_type = other RNA
taaagaagatacttgtgag

SEQ ID NO: 1799 - RNA, 19 nt, synthetic construct
  source 1..19: mol_type = other RNA
aaagaagatacttgtgagc

SEQ ID NO: 1800 - RNA, 19 nt, synthetic construct
  source 1..19: mol_type = other RNA
aagaagatacttgtgagca

SEQ ID NO: 1801 - RNA, 19 nt, synthetic construct
  source 1..19: mol_type = other RNA
agaagatacttgtgagcac

SEQ ID NO: 1802 - RNA, 19 nt, synthetic construct
  source 1..19: mol_type = other RNA
gaagatacttgtgagcaca

SEQ ID NO: 1803 - RNA, 19 nt, synthetic construct
  source 1..19: mol_type = other RNA
aagatacttgtgagcacaa

SEQ ID NO: 1804 - RNA, 19 nt, synthetic construct
  source 1..19: mol_type = other RNA
agatacttgtgagcacaag

SEQ ID NO: 1805 - RNA, 19 nt, synthetic construct
  source 1..19: mol_type = other RNA
gatacttgtgagcacaagc

SEQ ID NO: 1806 - RNA, 19 nt, synthetic construct
  source 1..19: mol_type = other RNA
atacttgtgagcacaagca

SEQ ID NO: 1807 - RNA, 19 nt, synthetic construct
  source 1..19: mol_type = other RNA
tacttgtgagcacaagcat

SEQ ID NO: 1808 - RNA, 19 nt, synthetic construct
  source 1..19: mol_type = other RNA
acttgtgagcacaagcatg

SEQ ID NO: 1809 - RNA, 19 nt, synthetic construct
  source 1..19: mol_type = other RNA
cttgtgagcacaagcatgc

SEQ ID NO: 1810 - RNA, 19 nt, synthetic construct
  source 1..19: mol_type = other RNA
ttgtgagcacaagcatgca

SEQ ID NO: 1811 - RNA, 19 nt, synthetic construct
  source 1..19: mol_type = other RNA
tgtgagcacaagcatgcat

SEQ ID NO: 1812 - RNA, 19 nt, synthetic construct
  source 1..19: mol_type = other RNA
gtgagcacaagcatgcatt

SEQ ID NO: 1813 - RNA, 19 nt, synthetic construct
  source 1..19: mol_type = other RNA
tgagcacaagcatgcattt

SEQ ID NO: 1814 - RNA, 19 nt, synthetic construct
  source 1..19: mol_type = other RNA
gagcacaagcatgcatttg

SEQ ID NO: 1815 - RNA, 19 nt, synthetic construct
  source 1..19: mol_type = other RNA
agcacaagcatgcatttga

SEQ ID NO: 1816 - RNA, 19 nt, synthetic construct
  source 1..19: mol_type = other RNA
gcacaagcatgcatttgaa

SEQ ID NO: 1817 - RNA, 19 nt, synthetic construct
  source 1..19: mol_type = other RNA
cacaagcatgcatttgaat

SEQ ID NO: 1818 - RNA, 19 nt, synthetic construct
  source 1..19: mol_type = other RNA
acaagcatgcatttgaatt

SEQ ID NO: 1819 - RNA, 19 nt, synthetic construct
  source 1..19: mol_type = other RNA
caagcatgcatttgaatta

SEQ ID NO: 1820 - RNA, 19 nt, synthetic construct
  source 1..19: mol_type = other RNA
aagcatgcatttgaattag

SEQ ID NO: 1821 - RNA, 19 nt, synthetic construct
  source 1..19: mol_type = other RNA
agcatgcatttgaattagt

SEQ ID NO: 1822 - RNA, 19 nt, synthetic construct
  source 1..19: mol_type = other RNA
gcatgcatttgaattagta

SEQ ID NO: 1823 - RNA, 19 nt, synthetic construct
  source 1..19: mol_type = other RNA
catgcatttgaattagtat

SEQ ID NO: 1824 - RNA, 19 nt, synthetic construct
  source 1..19: mol_type = other RNA
atgcatttgaattagtatc

SEQ ID NO: 1825 - RNA, 19 nt, synthetic construct
  source 1..19: mol_type = other RNA
tgcatttgaattagtatcc

SEQ ID NO: 1826 - RNA, 19 nt, synthetic construct
  source 1..19: mol_type = other RNA
gcatttgaattagtatcca

SEQ ID NO: 1827 - RNA, 19 nt, synthetic construct
  source 1..19: mol_type = other RNA
catttgaattagtatccaa

SEQ ID NO: 1828 - RNA, 19 nt, synthetic construct
  source 1..19: mol_type = other RNA
atttgaattagtatccaaa

SEQ ID NO: 1829 - RNA, 19 nt, synthetic construct
  source 1..19: mol_type = other RNA
tttgaattagtatccaaag

SEQ ID NO: 1830 - RNA, 19 nt, synthetic construct
  source 1..19: mol_type = other RNA
ttgaattagtatccaaaga

SEQ ID NO: 1831 - RNA, 19 nt, synthetic construct
  source 1..19: mol_type = other RNA
tgaattagtatccaaagat

SEQ ID NO: 1832 - RNA, 19 nt, synthetic construct
  source 1..19: mol_type = other RNA
gaattagtatccaaagatg

SEQ ID NO: 1833 - RNA, 19 nt, synthetic construct
  source 1..19: mol_type = other RNA
aattagtatccaaagatga

SEQ ID NO: 1834 - RNA, 19 nt, synthetic construct
  source 1..19: mol_type = other RNA
attagtatccaaagatgag

SEQ ID NO: 1835 - RNA, 19 nt, synthetic construct
  source 1..19: mol_type = other RNA
ttagtatccaaagatgaga

SEQ ID NO: 1836 - RNA, 19 nt, synthetic construct
  source 1..19: mol_type = other RNA
tagtatccaaagatgagaa

SEQ ID NO: 1837 - RNA, 19 nt, synthetic construct
  source 1..19: mol_type = other RNA
agtatccaaagatgagaac

SEQ ID NO: 1838 - RNA, 19 nt, synthetic construct
  source 1..19: mol_type = other RNA
gtatccaaagatgagaaca

SEQ ID NO: 1839 - RNA, 19 nt, synthetic construct
  source 1..19: mol_type = other RNA
tatccaaagatgagaacag

SEQ ID NO: 1840 - RNA, 19 nt, synthetic construct
  source 1..19: mol_type = other RNA
atccaaagatgagaacagc

SEQ ID NO: 1841 - RNA, 19 nt, synthetic construct
  source 1..19: mol_type = other RNA
tccaaagatgagaacagca

SEQ ID NO: 1842 - RNA, 19 nt, synthetic construct
  source 1..19: mol_type = other RNA
ccaaagatgagaacagcat

SEQ ID NO: 1843 - RNA, 19 nt, synthetic construct
  source 1..19: mol_type = other RNA
caaagatgagaacagcata

SEQ ID NO: 1844 - RNA, 19 nt, synthetic construct
  source 1..19: mol_type = other RNA
aaagatgagaacagcataa

SEQ ID NO: 1845 - RNA, 19 nt, synthetic construct
  source 1..19: mol_type = other RNA
aagatgagaacagcataat

SEQ ID NO: 1846 - RNA, 19 nt, synthetic construct
  source 1..19: mol_type = other RNA
agatgagaacagcataata

SEQ ID NO: 1847 - RNA, 19 nt, synthetic construct
  source 1..19: mol_type = other RNA
gatgagaacagcataatat

SEQ ID NO: 1848 - RNA, 19 nt, synthetic construct
  source 1..19: mol_type = other RNA
atgagaacagcataatatt

SEQ ID NO: 1849 - RNA, 19 nt, synthetic construct
  source 1..19: mol_type = other RNA
tgagaacagcataatattt

SEQ ID NO: 1850 - RNA, 19 nt, synthetic construct
  source 1..19: mol_type = other RNA
gagaacagcataatatttg

SEQ ID NO: 1851 - RNA, 19 nt, synthetic construct
  source 1..19: mol_type = other RNA
agaacagcataatatttgc

SEQ ID NO: 1852 - RNA, 19 nt, synthetic construct
  source 1..19: mol_type = other RNA
gaacagcataatatttgct

SEQ ID NO: 1853 - RNA, 19 nt, synthetic construct
  source 1..19: mol_type = other RNA
aacagcataatatttgctg

SEQ ID NO: 1854 - RNA, 19 nt, synthetic construct
  source 1..19: mol_type = other RNA
acagcataatatttgctgc

SEQ ID NO: 1855 - RNA, 19 nt, synthetic construct
  source 1..19: mol_type = other RNA
cagcataatatttgctgct

SEQ ID NO: 1856 - RNA, 19 nt, synthetic construct
  source 1..19: mol_type = other RNA
agcataatatttgctgcta

SEQ ID NO: 1857 - RNA, 19 nt, synthetic construct
  source 1..19: mol_type = other RNA
gcataatatttgctgctaa

SEQ ID NO: 1858 - RNA, 19 nt, synthetic construct
  source 1..19: mol_type = other RNA
cataatatttgctgctaag

SEQ ID NO: 1859 - RNA, 19 nt, synthetic construct
  source 1..19: mol_type = other RNA
ataatatttgctgctaagt

SEQ ID NO: 1860 - RNA, 19 nt, synthetic construct
  source 1..19: mol_type = other RNA
taatatttgctgctaagtc

SEQ ID NO: 1861 - RNA, 19 nt, synthetic construct
  source 1..19: mol_type = other RNA
aatatttgctgctaagtct

SEQ ID NO: 1862 - RNA, 19 nt, synthetic construct
  source 1..19: mol_type = other RNA
atatttgctgctaagtctg

SEQ ID NO: 1863 - RNA, 19 nt, synthetic construct
  source 1..19: mol_type = other RNA
tatttgctgctaagtctgc

SEQ ID NO: 1864 - RNA, 19 nt, synthetic construct
  source 1..19: mol_type = other RNA
atttgctgctaagtctgct

SEQ ID NO: 1865 - RNA, 19 nt, synthetic construct
  source 1..19: mol_type = other RNA
tttgctgctaagtctgctg

SEQ ID NO: 1866 - RNA, 19 nt, synthetic construct
  source 1..19: mol_type = other RNA
ttgctgctaagtctgctga

SEQ ID NO: 1867 - RNA, 19 nt, synthetic construct
  source 1..19: mol_type = other RNA
tgctgctaagtctgctgaa

SEQ ID NO: 1868 - RNA, 19 nt, synthetic construct
  source 1..19: mol_type = other RNA
gctgctaagtctgctgaag

SEQ ID NO: 1869 - RNA, 19 nt, synthetic construct
  source 1..19: mol_type = other RNA
ctgctaagtctgctgaaga

SEQ ID NO: 1870 - RNA, 19 nt, synthetic construct
  source 1..19: mol_type = other RNA
tgctaagtctgctgaagaa

SEQ ID NO: 1871 - RNA, 19 nt, synthetic construct
  source 1..19: mol_type = other RNA
gctaagtctgctgaagaaa

SEQ ID NO: 1872 - RNA, 19 nt, synthetic construct
  source 1..19: mol_type = other RNA
ctaagtctgctgaagaaaa

SEQ ID NO: 1873 - RNA, 19 nt, synthetic construct
  source 1..19: mol_type = other RNA
taagtctgctgaagaaaaa

SEQ ID NO: 1874 - RNA, 19 nt, synthetic construct
  source 1..19: mol_type = other RNA
aagtctgctgaagaaaaaa

SEQ ID NO: 1875 - RNA, 19 nt, synthetic construct
  source 1..19: mol_type = other RNA
agtctgctgaagaaaaaaa

SEQ ID NO: 1876 - RNA, 19 nt, synthetic construct
  source 1..19: mol_type = other RNA
gtctgctgaagaaaaaaac

SEQ ID NO: 1877 - RNA, 19 nt, synthetic construct
  source 1..19: mol_type = other RNA
tctgctgaagaaaaaaaca

SEQ ID NO: 1878 - RNA, 19 nt, synthetic construct
  source 1..19: mol_type = other RNA
ctgctgaagaaaaaaacaa

SEQ ID NO: 1879 - RNA, 19 nt, synthetic construct
  source 1..19: mol_type = other RNA
tgctgaagaaaaaaacaac

SEQ ID NO: 1880 - RNA, 19 nt, synthetic construct
  source 1..19: mol_type = other RNA
gctgaagaaaaaaacaact

SEQ ID NO: 1881 - RNA, 19 nt, synthetic construct
  source 1..19: mol_type = other RNA
ctgaagaaaaaaacaactg

SEQ ID NO: 1882 - RNA, 19 nt, synthetic construct
  source 1..19: mol_type = other RNA
tgaagaaaaaaacaactgg

SEQ ID NO: 1883 - RNA, 19 nt, synthetic construct
  source 1..19: mol_type = other RNA
gaagaaaaaaacaactgga

SEQ ID NO: 1884 - RNA, 19 nt, synthetic construct
  source 1..19: mol_type = other RNA
aagaaaaaaacaactggat

SEQ ID NO: 1885 - RNA, 19 nt, synthetic construct
  source 1..19: mol_type = other RNA
agaaaaaaacaactggatg

SEQ ID NO: 1886 - RNA, 19 nt, synthetic construct
  source 1..19: mol_type = other RNA
gaaaaaaacaactggatgg

SEQ ID NO: 1887 - RNA, 19 nt, synthetic construct
  source 1..19: mol_type = other RNA
aaaaaaacaactggatggc

SEQ ID NO: 1888 - RNA, 19 nt, synthetic construct
  source 1..19: mol_type = other RNA
aaaaaacaactggatggca

SEQ ID NO: 1889 - RNA, 19 nt, synthetic construct
  source 1..19: mol_type = other RNA
aaaaacaactggatggcag

SEQ ID NO: 1890 - RNA, 19 nt, synthetic construct
  source 1..19: mol_type = other RNA
aaaacaactggatggcagc

SEQ ID NO: 1891 - RNA, 19 nt, synthetic construct
  source 1..19: mol_type = other RNA
aaacaactggatggcagcc

SEQ ID NO: 1892 - RNA, 19 nt, synthetic construct
  source 1..19: mol_type = other RNA
aacaactggatggcagccc

SEQ ID NO: 1893 - RNA, 19 nt, synthetic construct
  source 1..19: mol_type = other RNA
acaactggatggcagccct

SEQ ID NO: 1894 - RNA, 19 nt, synthetic construct
  source 1..19: mol_type = other RNA
caactggatggcagccctt

SEQ ID NO: 1895 - RNA, 19 nt, synthetic construct
  source 1..19: mol_type = other RNA
aactggatggcagccctta

SEQ ID NO: 1896 - RNA, 19 nt, synthetic construct
  source 1..19: mol_type = other RNA
actggatggcagcccttat

SEQ ID NO: 1897 - RNA, 19 nt, synthetic construct
  source 1..19: mol_type = other RNA
ctggatggcagcccttatt

SEQ ID NO: 1898 - RNA, 19 nt, synthetic construct
  source 1..19: mol_type = other RNA
tggatggcagcccttattt

SEQ ID NO: 1899 - RNA, 19 nt, synthetic construct
  source 1..19: mol_type = other RNA
ggatggcagcccttatttc

SEQ ID NO: 1900 - RNA, 19 nt, synthetic construct
  source 1..19: mol_type = other RNA
gatggcagcccttatttct

SEQ ID NO: 1901 - RNA, 19 nt, synthetic construct
  source 1..19: mol_type = other RNA
atggcagcccttatttctc

SEQ ID NO: 1902 - RNA, 19 nt, synthetic construct
  source 1..19: mol_type = other RNA
tggcagcccttatttctct

SEQ ID NO: 1903 - RNA, 19 nt, synthetic construct
  source 1..19: mol_type = other RNA
ggcagcccttatttctctt

SEQ ID NO: 1904 - RNA, 19 nt, synthetic construct
  source 1..19: mol_type = other RNA
gcagcccttatttctcttc

SEQ ID NO: 1905 - RNA, 19 nt, synthetic construct
  source 1..19: mol_type = other RNA
cagcccttatttctcttca

SEQ ID NO: 1906 - RNA, 19 nt, synthetic construct
  source 1..19: mol_type = other RNA
agcccttatttctcttcat

SEQ ID NO: 1907 - RNA, 19 nt, synthetic construct
  source 1..19: mol_type = other RNA
gcccttatttctcttcatt

SEQ ID NO: 1908 - RNA, 19 nt, synthetic construct
  source 1..19: mol_type = other RNA
cccttatttctcttcatta

SEQ ID NO: 1909 - RNA, 19 nt, synthetic construct
  source 1..19: mol_type = other RNA
ccttatttctcttcattat

SEQ ID NO: 1910 - RNA, 19 nt, synthetic construct
  source 1..19: mol_type = other RNA
cttatttctcttcattatc

SEQ ID NO: 1911 - RNA, 19 nt, synthetic construct
  source 1..19: mol_type = other RNA
ttatttctcttcattatcg

SEQ ID NO: 1912 - RNA, 19 nt, synthetic construct
  source 1..19: mol_type = other RNA
tatttctcttcattatcgt

SEQ ID NO: 1913 - RNA, 19 nt, synthetic construct
  source 1..19: mol_type = other RNA
atttctcttcattatcgta

SEQ ID NO: 1914 - RNA, 19 nt, synthetic construct
  source 1..19: mol_type = other RNA
tttctcttcattatcgtag

SEQ ID NO: 1915 - RNA, 19 nt, synthetic construct
  source 1..19: mol_type = other RNA
ttctcttcattatcgtagt

SEQ ID NO: 1916 - RNA, 19 nt, synthetic construct
  source 1..19: mol_type = other RNA
tctcttcattatcgtagta

SEQ ID NO: 1917 - RNA, 19 nt, synthetic construct
  source 1..19: mol_type = other RNA
ctcttcattatcgtagtac

SEQ ID NO: 1918 - RNA, 19 nt, synthetic construct
  source 1..19: mol_type = other RNA
tcttcattatcgtagtact

SEQ ID NO: 1919 - RNA, 19 nt, synthetic construct
  source 1..19: mol_type = other RNA
cttcattatcgtagtactc

SEQ ID NO: 1920 - RNA, 19 nt, synthetic construct
  source 1..19: mol_type = other RNA
ttcattatcgtagtactct

SEQ ID NO: 1921 - RNA, 19 nt, synthetic construct
  source 1..19: mol_type = other RNA
tcattatcgtagtactcta

SEQ ID NO: 1922 - RNA, 19 nt, synthetic construct
  source 1..19: mol_type = other RNA
cattatcgtagtactctag

SEQ ID NO: 1923 - RNA, 19 nt, synthetic construct
  source 1..19: mol_type = other RNA
attatcgtagtactctaga

SEQ ID NO: 1924 - RNA, 19 nt, synthetic construct
  source 1..19: mol_type = other RNA
ttatcgtagtactctagat

SEQ ID NO: 1925 - RNA, 19 nt, synthetic construct
  source 1..19: mol_type = other RNA
tatcgtagtactctagatc

SEQ ID NO: 1926 - RNA, 19 nt, synthetic construct
  source 1..19: mol_type = other RNA
atcgtagtactctagatcg

SEQ ID NO: 1927 - RNA, 19 nt, synthetic construct
  source 1..19: mol_type = other RNA
tcgtagtactctagatcga

SEQ ID NO: 1928 - RNA, 19 nt, synthetic construct
  source 1..19: mol_type = other RNA
cgtagtactctagatcgaa

SEQ ID NO: 1929 - RNA, 19 nt, synthetic construct
  source 1..19: mol_type = other RNA
gtagtactctagatcgaat

SEQ ID NO: 1930 - RNA, 19 nt, synthetic construct
  source 1..19: mol_type = other RNA
tagtactctagatcgaatg

SEQ ID NO: 1931 - RNA, 19 nt, synthetic construct
  source 1..19: mol_type = other RNA
agtactctagatcgaatgt

SEQ ID NO: 1932 - RNA, 19 nt, synthetic construct
  source 1..19: mol_type = other RNA
gtactctagatcgaatgtt

SEQ ID NO: 1933 - RNA, 19 nt, synthetic construct
  source 1..19: mol_type = other RNA
tactctagatcgaatgtta

SEQ ID NO: 1934 - RNA, 19 nt, synthetic construct
  source 1..19: mol_type = other RNA
actctagatcgaatgttag

SEQ ID NO: 1935 - RNA, 19 nt, synthetic construct
  source 1..19: mol_type = other RNA
ctctagatcgaatgttaga

SEQ ID NO: 1936 - RNA, 19 nt, synthetic construct
  source 1..19: mol_type = other RNA
tctagatcgaatgttagat

SEQ ID NO: 1937 - RNA, 19 nt, synthetic construct
  source 1..19: mol_type = other RNA
ctagatcgaatgttagatt

SEQ ID NO: 1938 - RNA, 19 nt, synthetic construct
  source 1..19: mol_type = other RNA
tagatcgaatgttagattc

SEQ ID NO: 1939 - RNA, 19 nt, synthetic construct
  source 1..19: mol_type = other RNA
agatcgaatgttagattca

SEQ ID NO: 1940 - RNA, 19 nt, synthetic construct
  source 1..19: mol_type = other RNA
gatcgaatgttagattcag

SEQ ID NO: 1941 - RNA, 19 nt, synthetic construct
  source 1..19: mol_type = other RNA
atcgaatgttagattcagt

SEQ ID NO: 1942 - RNA, 19 nt, synthetic construct
  source 1..19: mol_type = other RNA
tcgaatgttagattcagta

SEQ ID NO: 1943 - RNA, 19 nt, synthetic construct
  source 1..19: mol_type = other RNA
cgaatgttagattcagtat

SEQ ID NO: 1944 - RNA, 19 nt, synthetic construct
  source 1..19: mol_type = other RNA
gaatgttagattcagtatt

SEQ ID NO: 1945 - RNA, 19 nt, synthetic construct
  source 1..19: mol_type = other RNA
aatgttagattcagtatta

SEQ ID NO: 1946 - RNA, 19 nt, synthetic construct
  source 1..19: mol_type = other RNA
atgttagattcagtattat

SEQ ID NO: 1947 - RNA, 19 nt, synthetic construct
  source 1..19: mol_type = other RNA
tgttagattcagtattatt

SEQ ID NO: 1948 - RNA, 19 nt, synthetic construct
  source 1..19: mol_type = other RNA
gttagattcagtattattg

SEQ ID NO: 1949 - RNA, 19 nt, synthetic construct
  source 1..19: mol_type = other RNA
ttagattcagtattattga

SEQ ID NO: 1950 - RNA, 19 nt, synthetic construct
  source 1..19: mol_type = other RNA
tagattcagtattattgaa

SEQ ID NO: 1951 - RNA, 19 nt, synthetic construct
  source 1..19: mol_type = other RNA
agattcagtattattgaaa

SEQ ID NO: 1952 - RNA, 19 nt, synthetic construct
  source 1..19: mol_type = other RNA
gattcagtattattgaaag

SEQ ID NO: 1953 - RNA, 19 nt, synthetic construct
  source 1..19: mol_type = other RNA
attcagtattattgaaaga

SEQ ID NO: 1954 - RNA, 19 nt, synthetic construct
  source 1..19: mol_type = other RNA
ttcagtattattgaaagaa

SEQ ID NO: 1955 - RNA, 19 nt, synthetic construct
  source 1..19: mol_type = other RNA
tcagtattattgaaagaag

SEQ ID NO: 1956 - RNA, 19 nt, synthetic construct
  source 1..19: mol_type = other RNA
cagtattattgaaagaaga

SEQ ID NO: 1957 - RNA, 19 nt, synthetic construct
  source 1..19: mol_type = other RNA
agtattattgaaagaagaa

SEQ ID NO: 1958 - RNA, 19 nt, synthetic construct
  source 1..19: mol_type = other RNA
gtattattgaaagaagaaa

SEQ ID NO: 1959 - RNA, 19 nt, synthetic construct
  source 1..19: mol_type = other RNA
tattattgaaagaagaaaa

SEQ ID NO: 1960 - RNA, 19 nt, synthetic construct
  source 1..19: mol_type = other RNA
attattgaaagaagaaaat

SEQ ID NO: 1961 - RNA, 19 nt, synthetic construct
  source 1..19: mol_type = other RNA
ttattgaaagaagaaaatg

SEQ ID NO: 1962 - RNA, 19 nt, synthetic construct
  source 1..19: mol_type = other RNA
tattgaaagaagaaaatga

SEQ ID NO: 1963 - RNA, 19 nt, synthetic construct
  source 1..19: mol_type = other RNA
attgaaagaagaaaatgag

SEQ ID NO: 1964 - RNA, 19 nt, synthetic construct
  source 1..19: mol_type = other RNA
ttgaaagaagaaaatgagc

SEQ ID NO: 1965 - RNA, 19 nt, synthetic construct
  source 1..19: mol_type = other RNA
tgaaagaagaaaatgagca

SEQ ID NO: 1966 - RNA, 19 nt, synthetic construct
  source 1..19: mol_type = other RNA
gaaagaagaaaatgagcaa

SEQ ID NO: 1967 - RNA, 19 nt, synthetic construct
  source 1..19: mol_type = other RNA
aaagaagaaaatgagcaac

SEQ ID NO: 1968 - RNA, 19 nt, synthetic construct
  source 1..19: mol_type = other RNA
aagaagaaaatgagcaacc

SEQ ID NO: 1969 - RNA, 19 nt, synthetic construct
  source 1..19: mol_type = other RNA
agaagaaaatgagcaacca

SEQ ID NO: 1970 - RNA, 19 nt, synthetic construct
  source 1..19: mol_type = other RNA
gaagaaaatgagcaaccac

SEQ ID NO: 1971 - RNA, 19 nt, synthetic construct
  source 1..19: mol_type = other RNA
aagaaaatgagcaaccact

SEQ ID NO: 1972 - RNA, 19 nt, synthetic construct
  source 1..19: mol_type = other RNA
agaaaatgagcaaccactg

SEQ ID NO: 1973 - RNA, 19 nt, synthetic construct
  source 1..19: mol_type = other RNA
gaaaatgagcaaccactga

SEQ ID NO: 1974 - RNA, 19 nt, synthetic construct
  source 1..19: mol_type = other RNA
aaaatgagcaaccactgag

SEQ ID NO: 1975 - RNA, 19 nt, synthetic construct
  source 1..19: mol_type = other RNA
aaatgagcaaccactgaga

SEQ ID NO: 1976 - RNA, 19 nt, synthetic construct
  source 1..19: mol_type = other RNA
aatgagcaaccactgagat

SEQ ID NO: 1977 - RNA, 19 nt, synthetic construct
  source 1..19: mol_type = other RNA
atgagcaaccactgagatt

SEQ ID NO: 1978 - RNA, 19 nt, synthetic construct
  source 1..19: mol_type = other RNA
tgagcaaccactgagatta

SEQ ID NO: 1979 - RNA, 19 nt, synthetic construct
  source 1..19: mol_type = other RNA
gagcaaccactgagattac

SEQ ID NO: 1980 - RNA, 19 nt, synthetic construct
  source 1..19: mol_type = other RNA
agcaaccactgagattacc

SEQ ID NO: 1981 - RNA, 19 nt, synthetic construct
  source 1..19: mol_type = other RNA
gcaaccactgagattacca

SEQ ID NO: 1982 - RNA, 19 nt, synthetic construct
  source 1..19: mol_type = other RNA
caaccactgagattaccaa

SEQ ID NO: 1983 - RNA, 19 nt, synthetic construct
  source 1..19: mol_type = other RNA
aaccactgagattaccaag

SEQ ID NO: 1984 - RNA, 19 nt, synthetic construct
  source 1..19: mol_type = other RNA
accactgagattaccaagt

SEQ ID NO: 1985 - RNA, 19 nt, synthetic construct
  source 1..19: mol_type = other RNA
ccactgagattaccaagtc

SEQ ID NO: 1986 - RNA, 19 nt, synthetic construct
  source 1..19: mol_type = other RNA
cactgagattaccaagtcc

SEQ ID NO: 1987 - RNA, 19 nt, synthetic construct
  source 1..19: mol_type = other RNA
actgagattaccaagtcct

SEQ ID NO: 1988 - RNA, 19 nt, synthetic construct
  source 1..19: mol_type = other RNA
ctgagattaccaagtcctg

SEQ ID NO: 1989 - RNA, 19 nt, synthetic construct
  source 1..19: mol_type = other RNA
tgagattaccaagtcctga

SEQ ID NO: 1990 - RNA, 19 nt, synthetic construct
  source 1..19: mol_type = other RNA
gagattaccaagtcctgaa

SEQ ID NO: 1991 - RNA, 19 nt, synthetic construct
  source 1..19: mol_type = other RNA
agattaccaagtcctgaag

SEQ ID NO: 1992 - RNA, 19 nt, synthetic construct
  source 1..19: mol_type = other RNA
gattaccaagtcctgaagt

SEQ ID NO: 1993 - RNA, 19 nt, synthetic construct
  source 1..19: mol_type = other RNA
attaccaagtcctgaagta

SEQ ID NO: 1994 - RNA, 19 nt, synthetic construct
  source 1..19: mol_type = other RNA
ttaccaagtcctgaagtat

SEQ ID NO: 1995 - RNA, 19 nt, synthetic construct
  source 1..19: mol_type = other RNA
taccaagtcctgaagtata

SEQ ID NO: 1996 - RNA, 19 nt, synthetic construct
  source 1..19: mol_type = other RNA
accaagtcctgaagtatat

SEQ ID NO: 1997 - RNA, 19 nt, synthetic construct
  source 1..19: mol_type = other RNA
ccaagtcctgaagtatatc

SEQ ID NO: 1998 - RNA, 19 nt, synthetic construct
  source 1..19: mol_type = other RNA
caagtcctgaagtatatcg

SEQ ID NO: 1999 - RNA, 19 nt, synthetic construct
  source 1..19: mol_type = other RNA
aagtcctgaagtatatcgt

SEQ ID NO: 2000 - RNA, 19 nt, synthetic construct
  source 1..19: mol_type = other RNA
agtcctgaagtatatcgtt

SEQ ID NO: 2001 - RNA, 19 nt, synthetic construct
  source 1..19: mol_type = other RNA
gtcctgaagtatatcgttt

SEQ ID NO: 2002 - RNA, 19 nt, synthetic construct
  source 1..19: mol_type = other RNA
tcctgaagtatatcgtttt

SEQ ID NO: 2003 - RNA, 19 nt, synthetic construct
  source 1..19: mol_type = other RNA
cctgaagtatatcgttttg

SEQ ID NO: 2004 - RNA, 19 nt, synthetic construct
  source 1..19: mol_type = other RNA
ctgaagtatatcgttttgt

SEQ ID NO: 2005 - RNA, 19 nt, synthetic construct
  source 1..19: mol_type = other RNA
tgaagtatatcgttttgta

SEQ ID NO: 2006 - RNA, 19 nt, synthetic construct
  source 1..19: mol_type = other RNA
gaagtatatcgttttgtag

SEQ ID NO: 2007 - RNA, 19 nt, synthetic construct
  source 1..19: mol_type = other RNA
aagtatatcgttttgtagt

SEQ ID NO: 2008 - RNA, 19 nt, synthetic construct
  source 1..19: mol_type = other RNA
agtatatcgttttgtagta

SEQ ID NO: 2009 - RNA, 19 nt, synthetic construct
  source 1..19: mol_type = other RNA
gtatatcgttttgtagtaa

SEQ ID NO: 2010 - RNA, 19 nt, synthetic construct
  source 1..19: mol_type = other RNA
tatatcgttttgtagtaaa

SEQ ID NO: 2011 - RNA, 19 nt, synthetic construct
  source 1..19: mol_type = other RNA
atatcgttttgtagtaaaa

SEQ ID NO: 2012 - RNA, 19 nt, synthetic construct
  source 1..19: mol_type = other RNA
tatcgttttgtagtaaaag

SEQ ID NO: 2013 - RNA, 19 nt, synthetic construct
  source 1..19: mol_type = other RNA
atcgttttgtagtaaaaga

SEQ ID NO: 2014 - RNA, 19 nt, synthetic construct
  source 1..19: mol_type = other RNA
tcgttttgtagtaaaagac

SEQ ID NO: 2015 - RNA, 19 nt, synthetic construct
  source 1..19: mol_type = other RNA
cgttttgtagtaaaagact

SEQ ID NO: 2016 - RNA, 19 nt, synthetic construct
  source 1..19: mol_type = other RNA
gttttgtagtaaaagactc

SEQ ID NO: 2017 - RNA, 19 nt, synthetic construct
  source 1..19: mol_type = other RNA
ttttgtagtaaaagactct

SEQ ID NO: 2018 - RNA, 19 nt, synthetic construct
  source 1..19: mol_type = other RNA
tttgtagtaaaagactctg

SEQ ID NO: 2019 - RNA, 19 nt, synthetic construct
  source 1..19: mol_type = other RNA
ttgtagtaaaagactctga

SEQ ID NO: 2020 - RNA, 19 nt, synthetic construct
  source 1..19: mol_type = other RNA
tgtagtaaaagactctgag

SEQ ID NO: 2021 - RNA, 19 nt, synthetic construct
  source 1..19: mol_type = other RNA
gtagtaaaagactctgagg

SEQ ID NO: 2022 - RNA, 19 nt, synthetic construct
  source 1..19: mol_type = other RNA
tagtaaaagactctgagga

SEQ ID NO: 2023 - RNA, 19 nt, synthetic construct
  source 1..19: mol_type = other RNA
agtaaaagactctgaggaa

SEQ ID NO: 2024 - RNA, 19 nt, synthetic construct
  source 1..19: mol_type = other RNA
gtaaaagactctgaggaaa

SEQ ID NO: 2025 - RNA, 19 nt, synthetic construct
  source 1..19: mol_type = other RNA
taaaagactctgaggaaaa

SEQ ID NO: 2026 - RNA, 19 nt, synthetic construct
  source 1..19: mol_type = other RNA
aaaagactctgaggaaaac

SEQ ID NO: 2027 - RNA, 19 nt, synthetic construct
  source 1..19: mol_type = other RNA
aaagactctgaggaaaaca

SEQ ID NO: 2028 - RNA, 19 nt, synthetic construct
  source 1..19: mol_type = other RNA
aagactctgaggaaaacat

SEQ ID NO: 2029 - RNA, 19 nt, synthetic construct
  source 1..19: mol_type = other RNA
agactctgaggaaaacatt

SEQ ID NO: 2030 - RNA, 19 nt, synthetic construct
  source 1..19: mol_type = other RNA
gactctgaggaaaacattg

SEQ ID NO: 2031 - RNA, 19 nt, synthetic construct
  source 1..19: mol_type = other RNA
actctgaggaaaacattgt

SEQ ID NO: 2032 - RNA, 19 nt, synthetic construct
  source 1..19: mol_type = other RNA
ctctgaggaaaacattgtt

SEQ ID NO: 2033 - RNA, 19 nt, synthetic construct
  source 1..19: mol_type = other RNA
tctgaggaaaacattgttt

SEQ ID NO: 2034 - RNA, 19 nt, synthetic construct
  source 1..19: mol_type = other RNA
ctgaggaaaacattgtttt

SEQ ID NO: 2035 - RNA, 19 nt, synthetic construct
  source 1..19: mol_type = other RNA
tgaggaaaacattgttttt

SEQ ID NO: 2036 - RNA, 19 nt, synthetic construct
  source 1..19: mol_type = other RNA
gaggaaaacattgtttttg

SEQ ID NO: 2037 - RNA, 19 nt, synthetic construct
  source 1..19: mol_type = other RNA
aggaaaacattgtttttga

SEQ ID NO: 2038 - RNA, 19 nt, synthetic construct
  source 1..19: mol_type = other RNA
ggaaaacattgtttttgaa

SEQ ID NO: 2039 - RNA, 19 nt, synthetic construct
  source 1..19: mol_type = other RNA
gaaaacattgtttttgaag

SEQ ID NO: 2040 - RNA, 19 nt, synthetic construct
  source 1..19: mol_type = other RNA
aaaacattgtttttgaaga

SEQ ID NO: 2041 - RNA, 19 nt, synthetic construct
  source 1..19: mol_type = other RNA
aaacattgtttttgaagac

SEQ ID NO: 2042 - RNA, 19 nt, synthetic construct
  source 1..19: mol_type = other RNA
aacattgtttttgaagaca

SEQ ID NO: 2043 - RNA, 19 nt, synthetic construct
  source 1..19: mol_type = other RNA
acattgtttttgaagacaa

SEQ ID NO: 2044 - RNA, 19 nt, synthetic construct
  source 1..19: mol_type = other RNA
cattgtttttgaagacaac

SEQ ID NO: 2045 - RNA, 19 nt, synthetic construct
  source 1..19: mol_type = other RNA
attgtttttgaagacaact

SEQ ID NO: 2046 - RNA, 19 nt, synthetic construct
  source 1..19: mol_type = other RNA
ttgtttttgaagacaactt

SEQ ID NO: 2047 - RNA, 19 nt, synthetic construct
  source 1..19: mol_type = other RNA
tgtttttgaagacaacttg

SEQ ID NO: 2048 - RNA, 19 nt, synthetic construct
  source 1..19: mol_type = other RNA
gtttttgaagacaacttgc

SEQ ID NO: 2049 - RNA, 19 nt, synthetic construct
  source 1..19: mol_type = other RNA
tttttgaagacaacttgca

SEQ ID NO: 2050 - RNA, 19 nt, synthetic construct
  source 1..19: mol_type = other RNA
ttttgaagacaacttgcaa

SEQ ID NO: 2051 - RNA, 19 nt, synthetic construct
  source 1..19: mol_type = other RNA
tttgaagacaacttgcaaa

SEQ ID NO: 2052 - RNA, 19 nt, synthetic construct
  source 1..19: mol_type = other RNA
ttgaagacaacttgcaaag

SEQ ID NO: 2053 - RNA, 19 nt, synthetic construct
  source 1..19: mol_type = other RNA
tgaagacaacttgcaaagt

SEQ ID NO: 2054 - RNA, 19 nt, synthetic construct
  source 1..19: mol_type = other RNA
gaagacaacttgcaaagta

SEQ ID NO: 2055 - RNA, 19 nt, synthetic construct
  source 1..19: mol_type = other RNA
aagacaacttgcaaagtag

SEQ ID NO: 2056 - RNA, 19 nt, synthetic construct
  source 1..19: mol_type = other RNA
agacaacttgcaaagtaga

SEQ ID NO: 2057 - RNA, 19 nt, synthetic construct
  source 1..19: mol_type = other RNA
gacaacttgcaaagtagaa

SEQ ID NO: 2058 - RNA, 19 nt, synthetic construct
  source 1..19: mol_type = other RNA
acaacttgcaaagtagaag

SEQ ID NO: 2059 - RNA, 19 nt, synthetic construct
  source 1..19: mol_type = other RNA
caacttgcaaagtagaagt

SEQ ID NO: 2060 - RNA, 19 nt, synthetic construct
  source 1..19: mol_type = other RNA
aacttgcaaagtagaagtg

SEQ ID NO: 2061 - RNA, 19 nt, synthetic construct
  source 1..19: mol_type = other RNA
acttgcaaagtagaagtgg

SEQ ID NO: 2062 - RNA, 19 nt, synthetic construct
  source 1..19: mol_type = other RNA
cttgcaaagtagaagtggc

SEQ ID NO: 2063 - RNA, 19 nt, synthetic construct
  source 1..19: mol_type = other RNA
ttgcaaagtagaagtggca

SEQ ID NO: 2064 - RNA, 19 nt, synthetic construct
  source 1..19: mol_type = other RNA
tgcaaagtagaagtggcat

SEQ ID NO: 2065 - RNA, 19 nt, synthetic construct
  source 1..19: mol_type = other RNA
gcaaagtagaagtggcatc

SEQ ID NO: 2066 - RNA, 19 nt, synthetic construct
  source 1..19: mol_type = other RNA
caaagtagaagtggcatcc

SEQ ID NO: 2067 - RNA, 19 nt, synthetic construct
  source 1..19: mol_type = other RNA
aaagtagaagtggcatccc

SEQ ID NO: 2068 - RNA, 19 nt, synthetic construct
  source 1..19: mol_type = other RNA
aagtagaagtggcatcccc

SEQ ID NO: 2069 - RNA, 19 nt, synthetic construct
  source 1..19: mol_type = other RNA
agtagaagtggcatcccca

SEQ ID NO: 2070 - RNA, 19 nt, synthetic construct
  source 1..19: mol_type = other RNA
gtagaagtggcatccccat

SEQ ID NO: 2071 - RNA, 19 nt, synthetic construct
  source 1..19: mol_type = other RNA
tagaagtggcatccccatt

SEQ ID NO: 2072 - RNA, 19 nt, synthetic construct
  source 1..19: mol_type = other RNA
agaagtggcatccccatta

SEQ ID NO: 2073 - RNA, 19 nt, synthetic construct
  source 1..19: mol_type = other RNA
gaagtggcatccccattat

SEQ ID NO: 2074 - RNA, 19 nt, synthetic construct
  source 1..19: mol_type = other RNA
aagtggcatccccattatt

SEQ ID NO: 2075 - RNA, 19 nt, synthetic construct
  source 1..19: mol_type = other RNA
agtggcatccccattatta

SEQ ID NO: 2076 - RNA, 19 nt, synthetic construct
  source 1..19: mol_type = other RNA
gtggcatccccattattaa

SEQ ID NO: 2077 - RNA, 19 nt, synthetic construct
  source 1..19: mol_type = other RNA
tggcatccccattattaaa

SEQ ID NO: 2078 - RNA, 19 nt, synthetic construct
  source 1..19: mol_type = other RNA
ggcatccccattattaaag

SEQ ID NO: 2079 - RNA, 19 nt, synthetic construct
  source 1..19: mol_type = other RNA
gcatccccattattaaagg

SEQ ID NO: 2080 - RNA, 19 nt, synthetic construct
  source 1..19: mol_type = other RNA
catccccattattaaagga

SEQ ID NO: 2081 - RNA, 19 nt, synthetic construct
  source 1..19: mol_type = other RNA
atccccattattaaaggag

SEQ ID NO: 2082 - RNA, 19 nt, synthetic construct
  source 1..19: mol_type = other RNA
tccccattattaaaggagg

SEQ ID NO: 2083 - RNA, 19 nt, synthetic construct
  source 1..19: mol_type = other RNA
ccccattattaaaggagga

SEQ ID NO: 2084 - RNA, 19 nt, synthetic construct
  source 1..19: mol_type = other RNA
cccattattaaaggaggaa

SEQ ID NO: 2085 - RNA, 19 nt, synthetic construct
  source 1..19: mol_type = other RNA
ccattattaaaggaggaac

SEQ ID NO: 2086 - RNA, 19 nt, synthetic construct
  source 1..19: mol_type = other RNA
cattattaaaggaggaact

SEQ ID NO: 2087 - RNA, 19 nt, synthetic construct
  source 1..19: mol_type = other RNA
attattaaaggaggaactg

SEQ ID NO: 2088 - RNA, 19 nt, synthetic construct
  source 1..19: mol_type = other RNA
ttattaaaggaggaactgt

SEQ ID NO: 2089 - RNA, 19 nt, synthetic construct
  source 1..19: mol_type = other RNA
tattaaaggaggaactgta

SEQ ID NO: 2090 - RNA, 19 nt, synthetic construct
  source 1..19: mol_type = other RNA
attaaaggaggaactgtag

SEQ ID NO: 2091 - RNA, 19 nt, synthetic construct
  source 1..19: mol_type = other RNA
ttaaaggaggaactgtagt

SEQ ID NO: 2092 - RNA, 19 nt, synthetic construct
  source 1..19: mol_type = other RNA
taaaggaggaactgtagtg

SEQ ID NO: 2093 - RNA, 19 nt, synthetic construct
  source 1..19: mol_type = other RNA
aaaggaggaactgtagtga

SEQ ID NO: 2094 - RNA, 19 nt, synthetic construct
  source 1..19: mol_type = other RNA
aaggaggaactgtagtgaa

SEQ ID NO: 2095 - RNA, 19 nt, synthetic construct
  source 1..19: mol_type = other RNA
aggaggaactgtagtgaaa

SEQ ID NO: 2096 - RNA, 19 nt, synthetic construct
  source 1..19: mol_type = other RNA
ggaggaactgtagtgaaat

SEQ ID NO: 2097 - RNA, 19 nt, synthetic construct
  source 1..19: mol_type = other RNA
gaggaactgtagtgaaatt

SEQ ID NO: 2098 - RNA, 19 nt, synthetic construct
  source 1..19: mol_type = other RNA
aggaactgtagtgaaatta

SEQ ID NO: 2099 - RNA, 19 nt, synthetic construct
  source 1..19: mol_type = other RNA
ggaactgtagtgaaattaa

SEQ ID NO: 2100 - RNA, 19 nt, synthetic construct
  source 1..19: mol_type = other RNA
gaactgtagtgaaattaat

SEQ ID NO: 2101 - RNA, 19 nt, synthetic construct
  source 1..19: mol_type = other RNA
aactgtagtgaaattaatt

SEQ ID NO: 2102 - RNA, 19 nt, synthetic construct
  source 1..19: mol_type = other RNA
actgtagtgaaattaattg

SEQ ID NO: 2103 - RNA, 19 nt, synthetic construct
  source 1..19: mol_type = other RNA
ctgtagtgaaattaattga

SEQ ID NO: 2104 - RNA, 19 nt, synthetic construct
  source 1..19: mol_type = other RNA
tgtagtgaaattaattgaa

SEQ ID NO: 2105 - RNA, 19 nt, synthetic construct
  source 1..19: mol_type = other RNA
gtagtgaaattaattgaaa

SEQ ID NO: 2106 - RNA, 19 nt, synthetic construct
  source 1..19: mol_type = other RNA
tagtgaaattaattgaaag

SEQ ID NO: 2107 - RNA, 19 nt, synthetic construct
  source 1..19: mol_type = other RNA
agtgaaattaattgaaagg

SEQ ID NO: 2108 - RNA, 19 nt, synthetic construct
  source 1..19: mol_type = other RNA
gtgaaattaattgaaaggt

SEQ ID NO: 2109 - RNA, 19 nt, synthetic construct
  source 1..19: mol_type = other RNA
tgaaattaattgaaaggtt

SEQ ID NO: 2110 - RNA, 19 nt, synthetic construct
  source 1..19: mol_type = other RNA
gaaattaattgaaaggtta

SEQ ID NO: 2111 - RNA, 19 nt, synthetic construct
  source 1..19: mol_type = other RNA
aaattaattgaaaggttaa

SEQ ID NO: 2112 - RNA, 19 nt, synthetic construct
  source 1..19: mol_type = other RNA
aattaattgaaaggttaac

SEQ ID NO: 2113 - RNA, 19 nt, synthetic construct
  source 1..19: mol_type = other RNA
attaattgaaaggttaaca

SEQ ID NO: 2114 - RNA, 19 nt, synthetic construct
  source 1..19: mol_type = other RNA
ttaattgaaaggttaacat

SEQ ID NO: 2115 - RNA, 19 nt, synthetic construct
  source 1..19: mol_type = other RNA
taattgaaaggttaacata

SEQ ID NO: 2116 - RNA, 19 nt, synthetic construct
  source 1..19: mol_type = other RNA
aattgaaaggttaacatat

SEQ ID NO: 2117 - RNA, 19 nt, synthetic construct
  source 1..19: mol_type = other RNA
attgaaaggttaacatatc

SEQ ID NO: 2118 - RNA, 19 nt, synthetic construct
  source 1..19: mol_type = other RNA
ttgaaaggttaacatatca

SEQ ID NO: 2119 - RNA, 19 nt, synthetic construct
  source 1..19: mol_type = other RNA
tgaaaggttaacatatcat

SEQ ID NO: 2120 - RNA, 19 nt, synthetic construct
  source 1..19: mol_type = other RNA
gaaaggttaacatatcata

SEQ ID NO: 2121 - RNA, 19 nt, synthetic construct
  source 1..19: mol_type = other RNA
aaaggttaacatatcatat

SEQ ID NO: 2122 - RNA, 19 nt, synthetic construct
  source 1..19: mol_type = other RNA
aaggttaacatatcatatg

SEQ ID NO: 2123 - RNA, 19 nt, synthetic construct
  source 1..19: mol_type = other RNA
aggttaacatatcatatgt

SEQ ID NO: 2124 - RNA, 19 nt, synthetic construct
  source 1..19: mol_type = other RNA
ggttaacatatcatatgta

SEQ ID NO: 2125 - RNA, 19 nt, synthetic construct
  source 1..19: mol_type = other RNA
gttaacatatcatatgtat

SEQ ID NO: 2126 - RNA, 19 nt, synthetic construct
  source 1..19: mol_type = other RNA
ttaacatatcatatgtatg

SEQ ID NO: 2127 - RNA, 19 nt, synthetic construct
  source 1..19: mol_type = other RNA
taacatatcatatgtatgc

SEQ ID NO: 2128 - RNA, 19 nt, synthetic construct
  source 1..19: mol_type = other RNA
aacatatcatatgtatgca

SEQ ID NO: 2129 - RNA, 19 nt, synthetic construct
  source 1..19: mol_type = other RNA
acatatcatatgtatgcag

SEQ ID NO: 2130 - RNA, 19 nt, synthetic construct
  source 1..19: mol_type = other RNA
catatcatatgtatgcaga

SEQ ID NO: 2131 - RNA, 19 nt, synthetic construct
  source 1..19: mol_type = other RNA
atatcatatgtatgcagat

SEQ ID NO: 2132 - RNA, 19 nt, synthetic construct
  source 1..19: mol_type = other RNA
tatcatatgtatgcagatc

SEQ ID NO: 2133 - RNA, 19 nt, synthetic construct
  source 1..19: mol_type = other RNA
atcatatgtatgcagatcc

SEQ ID NO: 2134 - RNA, 19 nt, synthetic construct
  source 1..19: mol_type = other RNA
tcatatgtatgcagatccc

SEQ ID NO: 2135 - RNA, 19 nt, synthetic construct
  source 1..19: mol_type = other RNA
catatgtatgcagatccca

SEQ ID NO: 2136 - RNA, 19 nt, synthetic construct
  source 1..19: mol_type = other RNA
atatgtatgcagatcccaa

SEQ ID NO: 2137 - RNA, 19 nt, synthetic construct
  source 1..19: mol_type = other RNA
tatgtatgcagatcccaat

SEQ ID NO: 2138 - RNA, 19 nt, synthetic construct
  source 1..19: mol_type = other RNA
atgtatgcagatcccaatt

SEQ ID NO: 2139 - RNA, 19 nt, synthetic construct
  source 1..19: mol_type = other RNA
tgtatgcagatcccaattt

SEQ ID NO: 2140 - RNA, 19 nt, synthetic construct
  source 1..19: mol_type = other RNA
gtatgcagatcccaatttt

SEQ ID NO: 2141 - RNA, 19 nt, synthetic construct
  source 1..19: mol_type = other RNA
tatgcagatcccaattttg

SEQ ID NO: 2142 - RNA, 19 nt, synthetic construct
  source 1..19: mol_type = other RNA
atgcagatcccaattttgt

SEQ ID NO: 2143 - RNA, 19 nt, synthetic construct
  source 1..19: mol_type = other RNA
tgcagatcccaattttgtt

SEQ ID NO: 2144 - RNA, 19 nt, synthetic construct
  source 1..19: mol_type = other RNA
gcagatcccaattttgttc

SEQ ID NO: 2145 - RNA, 19 nt, synthetic construct
  source 1..19: mol_type = other RNA
cagatcccaattttgttcg

SEQ ID NO: 2146 - RNA, 19 nt, synthetic construct
  source 1..19: mol_type = other RNA
agatcccaattttgttcgt

SEQ ID NO: 2147 - RNA, 19 nt, synthetic construct
  source 1..19: mol_type = other RNA
gatcccaattttgttcgta

SEQ ID NO: 2148 - RNA, 19 nt, synthetic construct
  source 1..19: mol_type = other RNA
atcccaattttgttcgtac

SEQ ID NO: 2149 - RNA, 19 nt, synthetic construct
  source 1..19: mol_type = other RNA
tcccaattttgttcgtact

SEQ ID NO: 2150 - RNA, 19 nt, synthetic construct
  source 1..19: mol_type = other RNA
cccaattttgttcgtactt

SEQ ID NO: 2151 - RNA, 19 nt, synthetic construct
  source 1..19: mol_type = other RNA
ccaattttgttcgtacttt

SEQ ID NO: 2152 - RNA, 19 nt, synthetic construct
  source 1..19: mol_type = other RNA
caattttgttcgtactttt

SEQ ID NO: 2153 - RNA, 19 nt, synthetic construct
  source 1..19: mol_type = other RNA
aattttgttcgtacttttc

SEQ ID NO: 2154 - RNA, 19 nt, synthetic construct
  source 1..19: mol_type = other RNA
attttgttcgtacttttct

SEQ ID NO: 2155 - RNA, 19 nt, synthetic construct
  source 1..19: mol_type = other RNA
ttttgttcgtacttttctt

SEQ ID NO: 2156 - RNA, 19 nt, synthetic construct
  source 1..19: mol_type = other RNA
tttgttcgtacttttctta

SEQ ID NO: 2157 - RNA, 19 nt, synthetic construct
  source 1..19: mol_type = other RNA
ttgttcgtacttttcttac

SEQ ID NO: 2158 - RNA, 19 nt, synthetic construct
  source 1..19: mol_type = other RNA
tgttcgtacttttcttacc

SEQ ID NO: 2159 - RNA, 19 nt, synthetic construct
  source 1..19: mol_type = other RNA
gttcgtacttttcttacca

SEQ ID NO: 2160 - RNA, 19 nt, synthetic construct
  source 1..19: mol_type = other RNA
ttcgtacttttcttaccac

SEQ ID NO: 2161 - RNA, 19 nt, synthetic construct
  source 1..19: mol_type = other RNA
tcgtacttttcttaccaca

SEQ ID NO: 2162 - RNA, 19 nt, synthetic construct
  source 1..19: mol_type = other RNA
cgtacttttcttaccacat

SEQ ID NO: 2163 - RNA, 19 nt, synthetic construct
  source 1..19: mol_type = other RNA
gtacttttcttaccacata

SEQ ID NO: 2164 - RNA, 19 nt, synthetic construct
  source 1..19: mol_type = other RNA
tacttttcttaccacatat

SEQ ID NO: 2165 - RNA, 19 nt, synthetic construct
  source 1..19: mol_type = other RNA
acttttcttaccacatatc

SEQ ID NO: 2166 - RNA, 19 nt, synthetic construct
  source 1..19: mol_type = other RNA
cttttcttaccacatatcg

SEQ ID NO: 2167 - RNA, 19 nt, synthetic construct
  source 1..19: mol_type = other RNA
ttttcttaccacatatcgt

SEQ ID NO: 2168 - RNA, 19 nt, synthetic construct
  source 1..19: mol_type = other RNA
tttcttaccacatatcgtt

SEQ ID NO: 2169 - RNA, 19 nt, synthetic construct
  source 1..19: mol_type = other RNA
ttcttaccacatatcgttc

SEQ ID NO: 2170 - RNA, 19 nt, synthetic construct
  source 1..19: mol_type = other RNA
tcttaccacatatcgttca

SEQ ID NO: 2171 - RNA, 19 nt, synthetic construct
  source 1..19: mol_type = other RNA
cttaccacatatcgttcat

SEQ ID NO: 2172 - RNA, 19 nt, synthetic construct
  source 1..19: mol_type = other RNA
ttaccacatatcgttcatt

SEQ ID NO: 2173 - RNA, 19 nt, synthetic construct
  source 1..19: mol_type = other RNA
taccacatatcgttcattt

SEQ ID NO: 2174 - RNA, 19 nt, synthetic construct
  source 1..19: mol_type = other RNA
accacatatcgttcatttt

SEQ ID NO: 2175 - RNA, 19 nt, synthetic construct
  source 1..19: mol_type = other RNA
ccacatatcgttcattttg

SEQ ID NO: 2176 - RNA, 19 nt, synthetic construct
  source 1..19: mol_type = other RNA
cacatatcgttcattttgt

SEQ ID NO: 2177 - RNA, 19 nt, synthetic construct
  source 1..19: mol_type = other RNA
acatatcgttcattttgta

SEQ ID NO: 2178 - RNA, 19 nt, synthetic construct
  source 1..19: mol_type = other RNA
catatcgttcattttgtaa

SEQ ID NO: 2179 - RNA, 19 nt, synthetic construct
  source 1..19: mol_type = other RNA
atatcgttcattttgtaaa

SEQ ID NO: 2180 - RNA, 19 nt, synthetic construct
  source 1..19: mol_type = other RNA
tatcgttcattttgtaaac

SEQ ID NO: 2181 - RNA, 19 nt, synthetic construct
  source 1..19: mol_type = other RNA
atcgttcattttgtaaacc

SEQ ID NO: 2182 - RNA, 19 nt, synthetic construct
  source 1..19: mol_type = other RNA
tcgttcattttgtaaacca

SEQ ID NO: 2183 - RNA, 19 nt, synthetic construct
  source 1..19: mol_type = other RNA
cgttcattttgtaaaccac

SEQ ID NO: 2184 - RNA, 19 nt, synthetic construct
  source 1..19: mol_type = other RNA
gttcattttgtaaaccaca

SEQ ID NO: 2185 - RNA, 19 nt, synthetic construct
  source 1..19: mol_type = other RNA
ttcattttgtaaaccacag

SEQ ID NO: 2186 - RNA, 19 nt, synthetic construct
  source 1..19: mol_type = other RNA
tcattttgtaaaccacagg

SEQ ID NO: 2187 - RNA, 19 nt, synthetic construct
  source 1..19: mol_type = other RNA
cattttgtaaaccacagga

SEQ ID NO: 2188 - RNA, 19 nt, synthetic construct
  source 1..19: mol_type = other RNA
attttgtaaaccacaggaa

SEQ ID NO: 2189 - RNA, 19 nt, synthetic construct
  source 1..19: mol_type = other RNA
ttttgtaaaccacaggaat

SEQ ID NO: 2190 - RNA, 19 nt, synthetic construct
  source 1..19: mol_type = other RNA
tttgtaaaccacaggaatt

SEQ ID NO: 2191 - RNA, 19 nt, synthetic construct
  source 1..19: mol_type = other RNA
ttgtaaaccacaggaattg

SEQ ID NO: 2192 - RNA, 19 nt, synthetic construct
  source 1..19: mol_type = other RNA
tgtaaaccacaggaattgc

SEQ ID NO: 2193 - RNA, 19 nt, synthetic construct
  source 1..19: mol_type = other RNA
gtaaaccacaggaattgct

SEQ ID NO: 2194 - RNA, 19 nt, synthetic construct
  source 1..19: mol_type = other RNA
taaaccacaggaattgctg

SEQ ID NO: 2195 - RNA, 19 nt, synthetic construct
  source 1..19: mol_type = other RNA
aaaccacaggaattgctga

SEQ ID NO: 2196 - RNA, 19 nt, synthetic construct
  source 1..19: mol_type = other RNA
aaccacaggaattgctgag

SEQ ID NO: 2197 - RNA, 19 nt, synthetic construct
  source 1..19: mol_type = other RNA
accacaggaattgctgagc

SEQ ID NO: 2198 - RNA, 19 nt, synthetic construct
  source 1..19: mol_type = other RNA
ccacaggaattgctgagct

SEQ ID NO: 2199 - RNA, 19 nt, synthetic construct
  source 1..19: mol_type = other RNA
cacaggaattgctgagctt

SEQ ID NO: 2200 - RNA, 19 nt, synthetic construct
  source 1..19: mol_type = other RNA
acaggaattgctgagctta

SEQ ID NO: 2201 - RNA, 19 nt, synthetic construct
  source 1..19: mol_type = other RNA
caggaattgctgagcttac

SEQ ID NO: 2202 - RNA, 19 nt, synthetic construct
  source 1..19: mol_type = other RNA
aggaattgctgagcttact

SEQ ID NO: 2203 - RNA, 19 nt, synthetic construct
  source 1..19: mol_type = other RNA
ggaattgctgagcttactg

SEQ ID NO: 2204 - RNA, 19 nt, synthetic construct
  source 1..19: mol_type = other RNA
gaattgctgagcttactga

SEQ ID NO: 2205 - RNA, 19 nt, synthetic construct
  source 1..19: mol_type = other RNA
aattgctgagcttactgat

SEQ ID NO: 2206 - RNA, 19 nt, synthetic construct
  source 1..19: mol_type = other RNA
attgctgagcttactgatt

SEQ ID NO: 2207 - RNA, 19 nt, synthetic construct
  source 1..19: mol_type = other RNA
ttgctgagcttactgattg

SEQ ID NO: 2208 - RNA, 19 nt, synthetic construct
  source 1..19: mol_type = other RNA
tgctgagcttactgattga

SEQ ID NO: 2209 - RNA, 19 nt, synthetic construct
  source 1..19: mol_type = other RNA
gctgagcttactgattgaa

SEQ ID NO: 2210 - RNA, 19 nt, synthetic construct
  source 1..19: mol_type = other RNA
ctgagcttactgattgaac

SEQ ID NO: 2211 - RNA, 19 nt, synthetic construct
  source 1..19: mol_type = other RNA
tgagcttactgattgaacg

SEQ ID NO: 2212 - RNA, 19 nt, synthetic construct
  source 1..19: mol_type = other RNA
gagcttactgattgaacgg

SEQ ID NO: 2213 - RNA, 19 nt, synthetic construct
  source 1..19: mol_type = other RNA
agcttactgattgaacggt

SEQ ID NO: 2214 - RNA, 19 nt, synthetic construct
  source 1..19: mol_type = other RNA
gcttactgattgaacggtt

SEQ ID NO: 2215 - RNA, 19 nt, synthetic construct
  source 1..19: mol_type = other RNA
cttactgattgaacggttt

SEQ ID NO: 2216 - RNA, 19 nt, synthetic construct
  source 1..19: mol_type = other RNA
ttactgattgaacggtttg

SEQ ID NO: 2217 - RNA, 19 nt, synthetic construct
  source 1..19: mol_type = other RNA
tactgattgaacggtttga

SEQ ID NO: 2218 - RNA, 19 nt, synthetic construct
  source 1..19: mol_type = other RNA
actgattgaacggtttgaa

SEQ ID NO: 2219 - RNA, 19 nt, synthetic construct
  source 1..19: mol_type = other RNA
ctgattgaacggtttgaaa

SEQ ID NO: 2220 - RNA, 19 nt, synthetic construct
  source 1..19: mol_type = other RNA
tgattgaacggtttgaaat

SEQ ID NO: 2221 - RNA, 19 nt, synthetic construct
  source 1..19: mol_type = other RNA
gattgaacggtttgaaatt

SEQ ID NO: 2222 - RNA, 19 nt, synthetic construct
  source 1..19: mol_type = other RNA
attgaacggtttgaaattc

SEQ ID NO: 2223 - RNA, 19 nt, synthetic construct
  source 1..19: mol_type = other RNA
ttgaacggtttgaaattcc

SEQ ID NO: 2224 - RNA, 19 nt, synthetic construct
  source 1..19: mol_type = other RNA
tgaacggtttgaaattcca

SEQ ID NO: 2225 - RNA, 19 nt, synthetic construct
  source 1..19: mol_type = other RNA
gaacggtttgaaattccag

SEQ ID NO: 2226 - RNA, 19 nt, synthetic construct
  source 1..19: mol_type = other RNA
aacggtttgaaattccaga

SEQ ID NO: 2227 - RNA, 19 nt, synthetic construct
  source 1..19: mol_type = other RNA
acggtttgaaattccagag

SEQ ID NO: 2228 - RNA, 19 nt, synthetic construct
  source 1..19: mol_type = other RNA
cggtttgaaattccagagc

SEQ ID NO: 2229 - RNA, 19 nt, synthetic construct
  source 1..19: mol_type = other RNA
ggtttgaaattccagagcc

SEQ ID NO: 2230 - RNA, 19 nt, synthetic construct
  source 1..19: mol_type = other RNA
gtttgaaattccagagcca

SEQ ID NO: 2231 - RNA, 19 nt, synthetic construct
  source 1..19: mol_type = other RNA
tttgaaattccagagccag

SEQ ID NO: 2232 - RNA, 19 nt, synthetic construct
  source 1..19: mol_type = other RNA
ttgaaattccagagccaga

SEQ ID NO: 2233 - RNA, 19 nt, synthetic construct
  source 1..19: mol_type = other RNA
tgaaattccagagccagaa

SEQ ID NO: 2234 - RNA, 19 nt, synthetic construct
  source 1..19: mol_type = other RNA
gaaattccagagccagaac

SEQ ID NO: 2235 - RNA, 19 nt, synthetic construct
  source 1..19: mol_type = other RNA
aaattccagagccagaacc

SEQ ID NO: 2236 - RNA, 19 nt, synthetic construct
  source 1..19: mol_type = other RNA
aattccagagccagaacct

SEQ ID NO: 2237 - RNA, 19 nt, synthetic construct
  source 1..19: mol_type = other RNA
attccagagccagaaccta

SEQ ID NO: 2238 - RNA, 19 nt, synthetic construct
  source 1..19: mol_type = other RNA
ttccagagccagaacctac

SEQ ID NO: 2239 - RNA, 19 nt, synthetic construct
  source 1..19: mol_type = other RNA
tccagagccagaacctact

SEQ ID NO: 2240 - RNA, 19 nt, synthetic construct
  source 1..19: mol_type = other RNA
ccagagccagaacctactg

SEQ ID NO: 2241 - RNA, 19 nt, synthetic construct
  source 1..19: mol_type = other RNA
cagagccagaacctactga

SEQ ID NO: 2242 - RNA, 19 nt, synthetic construct
  source 1..19: mol_type = other RNA
agagccagaacctactgac

SEQ ID NO: 2243 - RNA, 19 nt, synthetic construct
  source 1..19: mol_type = other RNA
gagccagaacctactgacg

SEQ ID NO: 2244 - RNA, 19 nt, synthetic construct
  source 1..19: mol_type = other RNA
agccagaacctactgacgc

SEQ ID NO: 2245 - RNA, 19 nt, synthetic construct
  source 1..19: mol_type = other RNA
gccagaacctactgacgca

SEQ ID NO: 2246 - RNA, 19 nt, synthetic construct
  source 1..19: mol_type = other RNA
ccagaacctactgacgcag

SEQ ID NO: 2247 - RNA, 19 nt, synthetic construct
  source 1..19: mol_type = other RNA
cagaacctactgacgcaga

SEQ ID NO: 2248 - RNA, 19 nt, synthetic construct
  source 1..19: mol_type = other RNA
agaacctactgacgcagac

SEQ ID NO: 2249 - RNA, 19 nt, synthetic construct
  source 1..19: mol_type = other RNA
gaacctactgacgcagaca

SEQ ID NO: 2250 - RNA, 19 nt, synthetic construct
  source 1..19: mol_type = other RNA
aacctactgacgcagacaa

SEQ ID NO: 2251 - RNA, 19 nt, synthetic construct
  source 1..19: mol_type = other RNA
acctactgacgcagacaaa

SEQ ID NO: 2252 - RNA, 19 nt, synthetic construct
  source 1..19: mol_type = other RNA
cctactgacgcagacaaat

SEQ ID NO: 2253 - RNA, 19 nt, synthetic construct
  source 1..19: mol_type = other RNA
ctactgacgcagacaaatt

SEQ ID NO: 2254 - RNA, 19 nt, synthetic construct
  source 1..19: mol_type = other RNA
tactgacgcagacaaattg

SEQ ID NO: 2255 - RNA, 19 nt, synthetic construct
  source 1..19: mol_type = other RNA
actgacgcagacaaattgg

SEQ ID NO: 2256 - RNA, 19 nt, synthetic construct
  source 1..19: mol_type = other RNA
ctgacgcagacaaattggc

SEQ ID NO: 2257 - RNA, 19 nt, synthetic construct
  source 1..19: mol_type = other RNA
tgacgcagacaaattggca

SEQ ID NO: 2258 - RNA, 19 nt, synthetic construct
  source 1..19: mol_type = other RNA
gacgcagacaaattggcaa

SEQ ID NO: 2259 - RNA, 19 nt, synthetic construct
  source 1..19: mol_type = other RNA
acgcagacaaattggcaat

SEQ ID NO: 2260 - RNA, 19 nt, synthetic construct
  source 1..19: mol_type = other RNA
cgcagacaaattggcaata

SEQ ID NO: 2261 - RNA, 19 nt, synthetic construct
  source 1..19: mol_type = other RNA
gcagacaaattggcaatag

SEQ ID NO: 2262 - RNA, 19 nt, synthetic construct
  source 1..19: mol_type = other RNA
cagacaaattggcaataga

SEQ ID NO: 2263 - RNA, 19 nt, synthetic construct
  source 1..19: mol_type = other RNA
agacaaattggcaatagag

SEQ ID NO: 2264 - RNA, 19 nt, synthetic construct
  source 1..19: mol_type = other RNA
gacaaattggcaatagaga

SEQ ID NO: 2265 - RNA, 19 nt, synthetic construct
  source 1..19: mol_type = other RNA
acaaattggcaatagagaa

SEQ ID NO: 2266 - RNA, 19 nt, synthetic construct
  source 1..19: mol_type = other RNA
caaattggcaatagagaaa

SEQ ID NO: 2267 - RNA, 19 nt, synthetic construct
  source 1..19: mol_type = other RNA
aaattggcaatagagaaag

SEQ ID NO: 2268 - RNA, 19 nt, synthetic construct
  source 1..19: mol_type = other RNA
aattggcaatagagaaagg

SEQ ID NO: 2269 - RNA, 19 nt, synthetic construct
  source 1..19: mol_type = other RNA
attggcaatagagaaaggc

SEQ ID NO: 2270 - RNA, 19 nt, synthetic construct
  source 1..19: mol_type = other RNA
ttggcaatagagaaaggcg

SEQ ID NO: 2271 - RNA, 19 nt, synthetic construct
  source 1..19: mol_type = other RNA
tggcaatagagaaaggcga

SEQ ID NO: 2272 - RNA, 19 nt, synthetic construct
  source 1..19: mol_type = other RNA
ggcaatagagaaaggcgag

SEQ ID NO: 2273 - RNA, 19 nt, synthetic construct
  source 1..19: mol_type = other RNA
gcaatagagaaaggcgagc

SEQ ID NO: 2274 - RNA, 19 nt, synthetic construct
  source 1..19: mol_type = other RNA
caatagagaaaggcgagca

SEQ ID NO: 2275 - RNA, 19 nt, synthetic construct
  source 1..19: mol_type = other RNA
aatagagaaaggcgagcag

SEQ ID NO: 2276 - RNA, 19 nt, synthetic construct
  source 1..19: mol_type = other RNA
atagagaaaggcgagcagc

SEQ ID NO: 2277 - RNA, 19 nt, synthetic construct
  source 1..19: mol_type = other RNA
tagagaaaggcgagcagcc

SEQ ID NO: 2278 - RNA, 19 nt, synthetic construct
  source 1..19: mol_type = other RNA
agagaaaggcgagcagcca

SEQ ID NO: 2279 - RNA, 19 nt, synthetic construct
  source 1..19: mol_type = other RNA
gagaaaggcgagcagccaa

SEQ ID NO: 2280 - RNA, 19 nt, synthetic construct
  source 1..19: mol_type = other RNA
agaaaggcgagcagccaat

SEQ ID NO: 2281 - RNA, 19 nt, synthetic construct
  source 1..19: mol_type = other RNA
gaaaggcgagcagccaatc

SEQ ID NO: 2282 - RNA, 19 nt, synthetic construct
  source 1..19: mol_type = other RNA
aaaggcgagcagccaatca

SEQ ID NO: 2283 - RNA, 19 nt, synthetic construct
  source 1..19: mol_type = other RNA
aaggcgagcagccaatcag

SEQ ID NO: 2284 - RNA, 19 nt, synthetic construct
  source 1..19: mol_type = other RNA
aggcgagcagccaatcagt

SEQ ID NO: 2285 - RNA, 19 nt, synthetic construct
  source 1..19: mol_type = other RNA
ggcgagcagccaatcagtg

SEQ ID NO: 2286 - RNA, 19 nt, synthetic construct
  source 1..19: mol_type = other RNA
gcgagcagccaatcagtgc

SEQ ID NO: 2287 - RNA, 19 nt, synthetic construct
  source 1..19: mol_type = other RNA
cgagcagccaatcagtgca

SEQ ID NO: 2288 - RNA, 19 nt, synthetic construct
  source 1..19: mol_type = other RNA
gagcagccaatcagtgcag

SEQ ID NO: 2289 - RNA, 19 nt, synthetic construct
  source 1..19: mol_type = other RNA
agcagccaatcagtgcaga

SEQ ID NO: 2290 - RNA, 19 nt, synthetic construct
  source 1..19: mol_type = other RNA
gcagccaatcagtgcagac

SEQ ID NO: 2291 - RNA, 19 nt, synthetic construct
  source 1..19: mol_type = other RNA
cagccaatcagtgcagacc

SEQ ID NO: 2292 - RNA, 19 nt, synthetic construct
  source 1..19: mol_type = other RNA
agccaatcagtgcagacct

SEQ ID NO: 2293 - RNA, 19 nt, synthetic construct
  source 1..19: mol_type = other RNA
gccaatcagtgcagacctt

SEQ ID NO: 2294 - RNA, 19 nt, synthetic construct
  source 1..19: mol_type = other RNA
ccaatcagtgcagacctta

SEQ ID NO: 2295 - RNA, 19 nt, synthetic construct
  source 1..19: mol_type = other RNA
caatcagtgcagaccttaa

SEQ ID NO: 2296 - RNA, 19 nt, synthetic construct
  source 1..19: mol_type = other RNA
aatcagtgcagaccttaaa

SEQ ID NO: 2297 - RNA, 19 nt, synthetic construct
  source 1..19: mol_type = other RNA
atcagtgcagaccttaaaa

SEQ ID NO: 2298 - RNA, 19 nt, synthetic construct
  source 1..19: mol_type = other RNA
tcagtgcagaccttaaaag

SEQ ID NO: 2299 - RNA, 19 nt, synthetic construct
  source 1..19: mol_type = other RNA
cagtgcagaccttaaaaga

SEQ ID NO: 2300 - RNA, 19 nt, synthetic construct
  source 1..19: mol_type = other RNA
agtgcagaccttaaaagat

SEQ ID NO: 2301 - RNA, 19 nt, synthetic construct
  source 1..19: mol_type = other RNA
gtgcagaccttaaaagatt

SEQ ID NO: 2302 - RNA, 19 nt, synthetic construct
  source 1..19: mol_type = other RNA
tgcagaccttaaaagattt

SEQ ID NO: 2303 - RNA, 19 nt, synthetic construct
  source 1..19: mol_type = other RNA
gcagaccttaaaagatttc

SEQ ID NO: 2304 - RNA, 19 nt, synthetic construct
  source 1..19: mol_type = other RNA
cagaccttaaaagatttcg

SEQ ID NO: 2305 - RNA, 19 nt, synthetic construct
  source 1..19: mol_type = other RNA
agaccttaaaagatttcgc

SEQ ID NO: 2306 - RNA, 19 nt, synthetic construct
  source 1..19: mol_type = other RNA
gaccttaaaagatttcgca

SEQ ID NO: 2307 - RNA, 19 nt, synthetic construct
  source 1..19: mol_type = other RNA
accttaaaagatttcgcaa

SEQ ID NO: 2308 - RNA, 19 nt, synthetic construct
  source 1..19: mol_type = other RNA
ccttaaaagatttcgcaag

SEQ ID NO: 2309 - RNA, 19 nt, synthetic construct
  source 1..19: mol_type = other RNA
cttaaaagatttcgcaagg

SEQ ID NO: 2310 - RNA, 19 nt, synthetic construct
  source 1..19: mol_type = other RNA
ttaaaagatttcgcaagga

SEQ ID NO: 2311 - RNA, 19 nt, synthetic construct
  source 1..19: mol_type = other RNA
taaaagatttcgcaaggaa

SEQ ID NO: 2312 - RNA, 19 nt, synthetic construct
  source 1..19: mol_type = other RNA
aaaagatttcgcaaggaat

SEQ ID NO: 2313 - RNA, 19 nt, synthetic construct
  source 1..19: mol_type = other RNA
aaagatttcgcaaggaata

SEQ ID NO: 2314 - RNA, 19 nt, synthetic construct
  source 1..19: mol_type = other RNA
aagatttcgcaaggaatat

SEQ ID NO: 2315 - RNA, 19 nt, synthetic construct
  source 1..19: mol_type = other RNA
agatttcgcaaggaatatg

SEQ ID NO: 2316 - RNA, 19 nt, synthetic construct
  source 1..19: mol_type = other RNA
gatttcgcaaggaatatgt

SEQ ID NO: 2317 - RNA, 19 nt, synthetic construct
  source 1..19: mol_type = other RNA
atttcgcaaggaatatgtc

SEQ ID NO: 2318 - RNA, 19 nt, synthetic construct
  source 1..19: mol_type = other RNA
tttcgcaaggaatatgtcc

SEQ ID NO: 2319 - RNA, 19 nt, synthetic construct
  source 1..19: mol_type = other RNA
ttcgcaaggaatatgtcca

SEQ ID NO: 2320 - RNA, 19 nt, synthetic construct
  source 1..19: mol_type = other RNA
tcgcaaggaatatgtccaa

SEQ ID NO: 2321 - RNA, 19 nt, synthetic construct
  source 1..19: mol_type = other RNA
cgcaaggaatatgtccaac

SEQ ID NO: 2322 - RNA, 19 nt, synthetic construct
  source 1..19: mol_type = other RNA
gcaaggaatatgtccaacc

SEQ ID NO: 2323 - RNA, 19 nt, synthetic construct
  source 1..19: mol_type = other RNA
caaggaatatgtccaacca

SEQ ID NO: 2324 - RNA, 19 nt, synthetic construct
  source 1..19: mol_type = other RNA
aaggaatatgtccaaccag

SEQ ID NO: 2325 - RNA, 19 nt, synthetic construct
  source 1..19: mol_type = other RNA
aggaatatgtccaaccagt

SEQ ID NO: 2326 - RNA, 19 nt, synthetic construct
  source 1..19: mol_type = other RNA
ggaatatgtccaaccagta

SEQ ID NO: 2327 - RNA, 19 nt, synthetic construct
  source 1..19: mol_type = other RNA
gaatatgtccaaccagtac

SEQ ID NO: 2328 - RNA, 19 nt, synthetic construct
  source 1..19: mol_type = other RNA
aatatgtccaaccagtaca

SEQ ID NO: 2329 - RNA, 19 nt, synthetic construct
  source 1..19: mol_type = other RNA
atatgtccaaccagtacaa

SEQ ID NO: 2330 - RNA, 19 nt, synthetic construct
  source 1..19: mol_type = other RNA
tatgtccaaccagtacaac

SEQ ID NO: 2331 - RNA, 19 nt, synthetic construct
  source 1..19: mol_type = other RNA
atgtccaaccagtacaact

SEQ ID NO: 2332 - RNA, 19 nt, synthetic construct
  source 1..19: mol_type = other RNA
tgtccaaccagtacaactt

SEQ ID NO: 2333 - RNA, 19 nt, synthetic construct
  source 1..19: mol_type = other RNA
gtccaaccagtacaactta

SEQ ID NO: 2334 - RNA, 19 nt, synthetic construct
  source 1..19: mol_type = other RNA
tccaaccagtacaacttag

SEQ ID NO: 2335 - RNA, 19 nt, synthetic construct
  source 1..19: mol_type = other RNA
ccaaccagtacaacttagg

SEQ ID NO: 2336 - RNA, 19 nt, synthetic construct
  source 1..19: mol_type = other RNA
caaccagtacaacttagga

SEQ ID NO: 2337 - RNA, 19 nt, synthetic construct
  source 1..19: mol_type = other RNA
aaccagtacaacttaggat

SEQ ID NO: 2338 - RNA, 19 nt, synthetic construct
  source 1..19: mol_type = other RNA
accagtacaacttaggatc

SEQ ID NO: 2339 - RNA, 19 nt, synthetic construct
  source 1..19: mol_type = other RNA
ccagtacaacttaggatct

SEQ ID NO: 2340 - RNA, 19 nt, synthetic construct
  source 1..19: mol_type = other RNA
cagtacaacttaggatctt

SEQ ID NO: 2341 - RNA, 19 nt, synthetic construct
  source 1..19: mol_type = other RNA
agtacaacttaggatctta

SEQ ID NO: 2342 - RNA, 19 nt, synthetic construct
  source 1..19: mol_type = other RNA
gtacaacttaggatcttaa

SEQ ID NO: 2343 - RNA, 19 nt, synthetic construct
  source 1..19: mol_type = other RNA
tacaacttaggatcttaaa

SEQ ID NO: 2344 - RNA, 19 nt, synthetic construct
  source 1..19: mol_type = other RNA
acaacttaggatcttaaat

SEQ ID NO: 2345 - RNA, 19 nt, synthetic construct
  source 1..19: mol_type = other RNA
caacttaggatcttaaatg

SEQ ID NO: 2346 - RNA, 19 nt, synthetic construct
  source 1..19: mol_type = other RNA
aacttaggatcttaaatgt

SEQ ID NO: 2347 - RNA, 19 nt, synthetic construct
  source 1..19: mol_type = other RNA
acttaggatcttaaatgta

SEQ ID NO: 2348 - RNA, 19 nt, synthetic construct
  source 1..19: mol_type = other RNA
cttaggatcttaaatgtat

SEQ ID NO: 2349 - RNA, 19 nt, synthetic construct
  source 1..19: mol_type = other RNA
ttaggatcttaaatgtatt

SEQ ID NO: 2350 - RNA, 19 nt, synthetic construct
  source 1..19: mol_type = other RNA
taggatcttaaatgtattt

SEQ ID NO: 2351 - RNA, 19 nt, synthetic construct
  source 1..19: mol_type = other RNA
aggatcttaaatgtatttc

SEQ ID NO: 2352 - RNA, 19 nt, synthetic construct
  source 1..19: mol_type = other RNA
ggatcttaaatgtatttcg

SEQ ID NO: 2353 - RNA, 19 nt, synthetic construct
  source 1..19: mol_type = other RNA
gatcttaaatgtatttcgg

SEQ ID NO: 2354 - RNA, 19 nt, synthetic construct
  source 1..19: mol_type = other RNA
atcttaaatgtatttcggc

SEQ ID NO: 2355 - RNA, 19 nt, synthetic construct
  source 1..19: mol_type = other RNA
tcttaaatgtatttcggca

SEQ ID NO: 2356 - RNA, 19 nt, synthetic construct
  source 1..19: mol_type = other RNA
cttaaatgtatttcggcat

SEQ ID NO: 2357 - RNA, 19 nt, synthetic construct
  source 1..19: mol_type = other RNA
ttaaatgtatttcggcatt

SEQ ID NO: 2358 - RNA, 19 nt, synthetic construct
  source 1..19: mol_type = other RNA
taaatgtatttcggcattg

SEQ ID NO: 2359 - RNA, 19 nt, synthetic construct
  source 1..19: mol_type = other RNA
aaatgtatttcggcattgg

SEQ ID NO: 2360 - RNA, 19 nt, synthetic construct
  source 1..19: mol_type = other RNA
aatgtatttcggcattggg

SEQ ID NO: 2361 - RNA, 19 nt, synthetic construct
  source 1..19: mol_type = other RNA
atgtatttcggcattgggt

SEQ ID NO: 2362 - RNA, 19 nt, synthetic construct
  source 1..19: mol_type = other RNA
tgtatttcggcattgggtt

SEQ ID NO: 2363 - RNA, 19 nt, synthetic construct
  source 1..19: mol_type = other RNA
gtatttcggcattgggttg

SEQ ID NO: 2364 - RNA, 19 nt, synthetic construct
  source 1..19: mol_type = other RNA
tatttcggcattgggttga

SEQ ID NO: 2365 - RNA, 19 nt, synthetic construct
  source 1..19: mol_type = other RNA
atttcggcattgggttgaa

SEQ ID NO: 2366 - RNA, 19 nt, synthetic construct
  source 1..19: mol_type = other RNA
tttcggcattgggttgaac

SEQ ID NO: 2367 - RNA, 19 nt, synthetic construct
  source 1..19: mol_type = other RNA
ttcggcattgggttgaaca

SEQ ID NO: 2368 - RNA, 19 nt, synthetic construct
  source 1..19: mol_type = other RNA
tcggcattgggttgaacat

SEQ ID NO: 2369 - RNA, 19 nt, synthetic construct
  source 1..19: mol_type = other RNA
cggcattgggttgaacatc

SEQ ID NO: 2370 - RNA, 19 nt, synthetic construct
  source 1..19: mol_type = other RNA
ggcattgggttgaacatca

SEQ ID NO: 2371 - RNA, 19 nt, synthetic construct
  source 1..19: mol_type = other RNA
gcattgggttgaacatcat

SEQ ID NO: 2372 - RNA, 19 nt, synthetic construct
  source 1..19: mol_type = other RNA
cattgggttgaacatcatt

SEQ ID NO: 2373 - RNA, 19 nt, synthetic construct
  source 1..19: mol_type = other RNA
attgggttgaacatcattt

SEQ ID NO: 2374 - RNA, 19 nt, synthetic construct
  source 1..19: mol_type = other RNA
ttgggttgaacatcatttt

SEQ ID NO: 2375 - RNA, 19 nt, synthetic construct
  source 1..19: mol_type = other RNA
tgggttgaacatcattttt

SEQ ID NO: 2376 - RNA, 19 nt, synthetic construct
  source 1..19: mol_type = other RNA
gggttgaacatcattttta

SEQ ID NO: 2377 - RNA, 19 nt, synthetic construct
  source 1..19: mol_type = other RNA
ggttgaacatcatttttat

SEQ ID NO: 2378 - RNA, 19 nt, synthetic construct
  source 1..19: mol_type = other RNA
gttgaacatcatttttatg

SEQ ID NO: 2379 - RNA, 19 nt, synthetic construct
  source 1..19: mol_type = other RNA
ttgaacatcatttttatga

SEQ ID NO: 2380 - RNA, 19 nt, synthetic construct
  source 1..19: mol_type = other RNA
tgaacatcatttttatgac

SEQ ID NO: 2381 - RNA, 19 nt, synthetic construct
  source 1..19: mol_type = other RNA
gaacatcatttttatgact

SEQ ID NO: 2382 - RNA, 19 nt, synthetic construct
  source 1..19: mol_type = other RNA
aacatcatttttatgactt

SEQ ID NO: 2383 - RNA, 19 nt, synthetic construct
  source 1..19: mol_type = other RNA
acatcatttttatgacttt

SEQ ID NO: 2384 - RNA, 19 nt, synthetic construct
  source 1..19: mol_type = other RNA
catcatttttatgactttg

SEQ ID NO: 2385 - RNA, 19 nt, synthetic construct
  source 1..19: mol_type = other RNA
atcatttttatgactttga

SEQ ID NO: 2386 - RNA, 19 nt, synthetic construct
  source 1..19: mol_type = other RNA
tcatttttatgactttgaa

SEQ ID NO: 2387 - RNA, 19 nt, synthetic construct
  source 1..19: mol_type = other RNA
catttttatgactttgaaa

SEQ ID NO: 2388 - RNA, 19 nt, synthetic construct
  source 1..19: mol_type = other RNA
atttttatgactttgaaag

SEQ ID NO: 2389 - RNA, 19 nt, synthetic construct
  source 1..19: mol_type = other RNA
tttttatgactttgaaaga

SEQ ID NO: 2390 - RNA, 19 nt, synthetic construct
  source 1..19: mol_type = other RNA
ttttatgactttgaaagag

SEQ ID NO: 2391 - RNA, 19 nt, synthetic construct
  source 1..19: mol_type = other RNA
tttatgactttgaaagaga

SEQ ID NO: 2392 - RNA, 19 nt, synthetic construct
  source 1..19: mol_type = other RNA
ttatgactttgaaagagac

SEQ ID NO: 2393 - RNA, 19 nt, synthetic construct
  source 1..19: mol_type = other RNA
tatgactttgaaagagact

SEQ ID NO: 2394 - RNA, 19 nt, synthetic construct
  source 1..19: mol_type = other RNA
atgactttgaaagagactt

SEQ ID NO: 2395 - RNA, 19 nt, synthetic construct
  source 1..19: mol_type = other RNA
tgactttgaaagagacttg

SEQ ID NO: 2396 - RNA, 19 nt, synthetic construct
  source 1..19: mol_type = other RNA
gactttgaaagagacttgg

SEQ ID NO: 2397 - RNA, 19 nt, synthetic construct
  source 1..19: mol_type = other RNA
actttgaaagagacttgga

SEQ ID NO: 2398 - RNA, 19 nt, synthetic construct
  source 1..19: mol_type = other RNA
ctttgaaagagacttggaa

SEQ ID NO: 2399 - RNA, 19 nt, synthetic construct
  source 1..19: mol_type = other RNA
tttgaaagagacttggaat

SEQ ID NO: 2400 - RNA, 19 nt, synthetic construct
  source 1..19: mol_type = other RNA
ttgaaagagacttggaatt

SEQ ID NO: 2401 - RNA, 19 nt, synthetic construct
  source 1..19: mol_type = other RNA
tgaaagagacttggaattg

SEQ ID NO: 2402 - RNA, 19 nt, synthetic construct
  source 1..19: mol_type = other RNA
gaaagagacttggaattgc

SEQ ID NO: 2403 - RNA, 19 nt, synthetic construct
  source 1..19: mol_type = other RNA
aaagagacttggaattgct

SEQ ID NO: 2404 - RNA, 19 nt, synthetic construct
  source 1..19: mol_type = other RNA
aagagacttggaattgctt

SEQ ID NO: 2405 - RNA, 19 nt, synthetic construct
  source 1..19: mol_type = other RNA
agagacttggaattgcttg

SEQ ID NO: 2406 - RNA, 19 nt, synthetic construct
  source 1..19: mol_type = other RNA
gagacttggaattgcttga

SEQ ID NO: 2407 - RNA, 19 nt, synthetic construct
  source 1..19: mol_type = other RNA
agacttggaattgcttgaa

SEQ ID NO: 2408 - RNA, 19 nt, synthetic construct
  source 1..19: mol_type = other RNA
gacttggaattgcttgaaa

SEQ ID NO: 2409 - RNA, 19 nt, synthetic construct
  source 1..19: mol_type = other RNA
acttggaattgcttgaaag

SEQ ID NO: 2410 - RNA, 19 nt, synthetic construct
  source 1..19: mol_type = other RNA
cttggaattgcttgaaaga

SEQ ID NO: 2411 - RNA, 19 nt, synthetic construct
  source 1..19: mol_type = other RNA
ttggaattgcttgaaagac

SEQ ID NO: 2412 - RNA, 19 nt, synthetic construct
  source 1..19: mol_type = other RNA
tggaattgcttgaaagact

SEQ ID NO: 2413 - RNA, 19 nt, synthetic construct
  source 1..19: mol_type = other RNA
ggaattgcttgaaagacta

SEQ ID NO: 2414 - RNA, 19 nt, synthetic construct
  source 1..19: mol_type = other RNA
gaattgcttgaaagactag

SEQ ID NO: 2415 - RNA, 19 nt, synthetic construct
  source 1..19: mol_type = other RNA
aattgcttgaaagactaga

SEQ ID NO: 2416 - RNA, 19 nt, synthetic construct
  source 1..19: mol_type = other RNA
attgcttgaaagactagaa

SEQ ID NO: 2417 - RNA, 19 nt, synthetic construct
  source 1..19: mol_type = other RNA
ttgcttgaaagactagaat

SEQ ID NO: 2418 - RNA, 19 nt, synthetic construct
  source 1..19: mol_type = other RNA
tgcttgaaagactagaatc

SEQ ID NO: 2419 - RNA, 19 nt, synthetic construct
  source 1..19: mol_type = other RNA
gcttgaaagactagaatcc

SEQ ID NO: 2420 - RNA, 19 nt, synthetic construct
  source 1..19: mol_type = other RNA
cttgaaagactagaatcct

SEQ ID NO: 2421 - RNA, 19 nt, synthetic construct
  source 1..19: mol_type = other RNA
ttgaaagactagaatcctt

SEQ ID NO: 2422 - RNA, 19 nt, synthetic construct
  source 1..19: mol_type = other RNA
tgaaagactagaatccttc

SEQ ID NO: 2423 - RNA, 19 nt, synthetic construct
  source 1..19: mol_type = other RNA
gaaagactagaatccttca

SEQ ID NO: 2424 - RNA, 19 nt, synthetic construct
  source 1..19: mol_type = other RNA
aaagactagaatccttcat

SEQ ID NO: 2425 - RNA, 19 nt, synthetic construct
  source 1..19: mol_type = other RNA
aagactagaatccttcatt

SEQ ID NO: 2426 - RNA, 19 nt, synthetic construct
  source 1..19: mol_type = other RNA
agactagaatccttcattt

SEQ ID NO: 2427 - RNA, 19 nt, synthetic construct
  source 1..19: mol_type = other RNA
gactagaatccttcatttc

SEQ ID NO: 2428 - RNA, 19 nt, synthetic construct
  source 1..19: mol_type = other RNA
actagaatccttcatttca

SEQ ID NO: 2429 - RNA, 19 nt, synthetic construct
  source 1..19: mol_type = other RNA
ctagaatccttcatttcaa

SEQ ID NO: 2430 - RNA, 19 nt, synthetic construct
  source 1..19: mol_type = other RNA
tagaatccttcatttcaag

SEQ ID NO: 2431 - RNA, 19 nt, synthetic construct
  source 1..19: mol_type = other RNA
agaatccttcatttcaagt

SEQ ID NO: 2432 - RNA, 19 nt, synthetic construct
  source 1..19: mol_type = other RNA
gaatccttcatttcaagtg

SEQ ID NO: 2433 - RNA, 19 nt, synthetic construct
  source 1..19: mol_type = other RNA
aatccttcatttcaagtgt

SEQ ID NO: 2434 - RNA, 19 nt, synthetic construct
  source 1..19: mol_type = other RNA
atccttcatttcaagtgta

SEQ ID NO: 2435 - RNA, 19 nt, synthetic construct
  source 1..19: mol_type = other RNA
tccttcatttcaagtgtaa

SEQ ID NO: 2436 - RNA, 19 nt, synthetic construct
  source 1..19: mol_type = other RNA
ccttcatttcaagtgtaag

SEQ ID NO: 2437 - RNA, 19 nt, synthetic construct
  source 1..19: mol_type = other RNA
cttcatttcaagtgtaaga

SEQ ID NO: 2438 - RNA, 19 nt, synthetic construct
  source 1..19: mol_type = other RNA
ttcatttcaagtgtaagag

SEQ ID NO: 2439 - RNA, 19 nt, synthetic construct
  source 1..19: mol_type = other RNA
tcatttcaagtgtaagagg

SEQ ID NO: 2440 - RNA, 19 nt, synthetic construct
  source 1..19: mol_type = other RNA
catttcaagtgtaagaggg

SEQ ID NO: 2441 - RNA, 19 nt, synthetic construct
  source 1..19: mol_type = other RNA
atttcaagtgtaagaggga

SEQ ID NO: 2442 - RNA, 19 nt, synthetic construct
  source 1..19: mol_type = other RNA
tttcaagtgtaagagggaa

SEQ ID NO: 2443 - RNA, 19 nt, synthetic construct
  source 1..19: mol_type = other RNA
ttcaagtgtaagagggaaa

SEQ ID NO: 2444 - RNA, 19 nt, synthetic construct
  source 1..19: mol_type = other RNA
tcaagtgtaagagggaaag

SEQ ID NO: 2445 - RNA, 19 nt, synthetic construct
  source 1..19: mol_type = other RNA
caagtgtaagagggaaagc

SEQ ID NO: 2446 - RNA, 19 nt, synthetic construct
  source 1..19: mol_type = other RNA
aagtgtaagagggaaagct

SEQ ID NO: 2447 - RNA, 19 nt, synthetic construct
  source 1..19: mol_type = other RNA
agtgtaagagggaaagcta

SEQ ID NO: 2448 - RNA, 19 nt, synthetic construct
  source 1..19: mol_type = other RNA
gtgtaagagggaaagctat

SEQ ID NO: 2449 - RNA, 19 nt, synthetic construct
  source 1..19: mol_type = other RNA
tgtaagagggaaagctatg

SEQ ID NO: 2450 - RNA, 19 nt, synthetic construct
  source 1..19: mol_type = other RNA
gtaagagggaaagctatga

SEQ ID NO: 2451 - RNA, 19 nt, synthetic construct
  source 1..19: mol_type = other RNA
taagagggaaagctatgaa

SEQ ID NO: 2452 - RNA, 19 nt, synthetic construct
  source 1..19: mol_type = other RNA
aagagggaaagctatgaaa

SEQ ID NO: 2453 - RNA, 19 nt, synthetic construct
  source 1..19: mol_type = other RNA
agagggaaagctatgaaaa

SEQ ID NO: 2454 - RNA, 19 nt, synthetic construct
  source 1..19: mol_type = other RNA
gagggaaagctatgaaaaa

SEQ ID NO: 2455 - RNA, 19 nt, synthetic construct
  source 1..19: mol_type = other RNA
agggaaagctatgaaaaaa

SEQ ID NO: 2456 - RNA, 19 nt, synthetic construct
  source 1..19: mol_type = other RNA
gggaaagctatgaaaaaat

SEQ ID NO: 2457 - RNA, 19 nt, synthetic construct
  source 1..19: mol_type = other RNA
ggaaagctatgaaaaaatg

SEQ ID NO: 2458 - RNA, 19 nt, synthetic construct
  source 1..19: mol_type = other RNA
gaaagctatgaaaaaatgg

SEQ ID NO: 2459 - RNA, 19 nt, synthetic construct
  source 1..19: mol_type = other RNA
aaagctatgaaaaaatggg

SEQ ID NO: 2460 - RNA, 19 nt, synthetic construct
  source 1..19: mol_type = other RNA
aagctatgaaaaaatgggt

SEQ ID NO: 2461 - RNA, 19 nt, synthetic construct
  source 1..19: mol_type = other RNA
agctatgaaaaaatgggta

SEQ ID NO: 2462 - RNA, 19 nt, synthetic construct
  source 1..19: mol_type = other RNA
gctatgaaaaaatgggtag

SEQ ID NO: 2463 - RNA, 19 nt, synthetic construct
  source 1..19: mol_type = other RNA
ctatgaaaaaatgggtaga

SEQ ID NO: 2464 - RNA, 19 nt, synthetic construct
  source 1..19: mol_type = other RNA
tatgaaaaaatgggtagag

SEQ ID NO: 2465 - RNA, 19 nt, synthetic construct
  source 1..19: mol_type = other RNA
atgaaaaaatgggtagagt

SEQ ID NO: 2466 - RNA, 19 nt, synthetic construct
  source 1..19: mol_type = other RNA
tgaaaaaatgggtagagtc

SEQ ID NO: 2467 - RNA, 19 nt, synthetic construct
  source 1..19: mol_type = other RNA
gaaaaaatgggtagagtca

SEQ ID NO: 2468 - RNA, 19 nt, synthetic construct
  source 1..19: mol_type = other RNA
aaaaaatgggtagagtcaa

SEQ ID NO: 2469 - RNA, 19 nt, synthetic construct
  source 1..19: mol_type = other RNA
aaaaatgggtagagtcaat

SEQ ID NO: 2470 - RNA, 19 nt, synthetic construct
  source 1..19: mol_type = other RNA
aaaatgggtagagtcaatt

SEQ ID NO: 2471 - RNA, 19 nt, synthetic construct
  source 1..19: mol_type = other RNA
aaatgggtagagtcaattg

SEQ ID NO: 2472 - RNA, 19 nt, synthetic construct
  source 1..19: mol_type = other RNA
aatgggtagagtcaattgc

SEQ ID NO: 2473 - RNA, 19 nt, synthetic construct
  source 1..19: mol_type = other RNA
atgggtagagtcaattgct

SEQ ID NO: 2474 - RNA, 19 nt, synthetic construct
  source 1..19: mol_type = other RNA
tgggtagagtcaattgcta

SEQ ID NO: 2475 - RNA, 19 nt, synthetic construct
  source 1..19: mol_type = other RNA
gggtagagtcaattgctaa

SEQ ID NO: 2476 - RNA, 19 nt, synthetic construct
  source 1..19: mol_type = other RNA
ggtagagtcaattgctaag

SEQ ID NO: 2477 - RNA, 19 nt, synthetic construct
  source 1..19: mol_type = other RNA
gtagagtcaattgctaaga

SEQ ID NO: 2478 - RNA, 19 nt, synthetic construct
  source 1..19: mol_type = other RNA
tagagtcaattgctaagat

SEQ ID NO: 2479 - RNA, 19 nt, synthetic construct
  source 1..19: mol_type = other RNA
agagtcaattgctaagatc

SEQ ID NO: 2480 - RNA, 19 nt, synthetic construct
  source 1..19: mol_type = other RNA
gagtcaattgctaagatca

SEQ ID NO: 2481 - RNA, 19 nt, synthetic construct
  source 1..19: mol_type = other RNA
agtcaattgctaagatcat

SEQ ID NO: 2482 - RNA, 19 nt, synthetic construct
  source 1..19: mol_type = other RNA
gtcaattgctaagatcatc

SEQ ID NO: 2483 - RNA, 19 nt, synthetic construct
  source 1..19: mol_type = other RNA
tcaattgctaagatcatca

SEQ ID NO: 2484 - RNA, 19 nt, synthetic construct
  source 1..19: mol_type = other RNA
caattgctaagatcatcag

SEQ ID NO: 2485 - RNA, 19 nt, synthetic construct
  source 1..19: mol_type = other RNA
aattgctaagatcatcagg

SEQ ID NO: 2486 - RNA, 19 nt, synthetic construct
  source 1..19: mol_type = other RNA
attgctaagatcatcagga

SEQ ID NO: 2487 - RNA, 19 nt, synthetic construct
  source 1..19: mol_type = other RNA
ttgctaagatcatcaggag

SEQ ID NO: 2488 - RNA, 19 nt, synthetic construct
  source 1..19: mol_type = other RNA
tgctaagatcatcaggagg

SEQ ID NO: 2489 - RNA, 19 nt, synthetic construct
  source 1..19: mol_type = other RNA
gctaagatcatcaggagga

SEQ ID NO: 2490 - RNA, 19 nt, synthetic construct
  source 1..19: mol_type = other RNA
ctaagatcatcaggaggaa

SEQ ID NO: 2491 - RNA, 19 nt, synthetic construct
  source 1..19: mol_type = other RNA
taagatcatcaggaggaag

SEQ ID NO: 2492 - RNA, 19 nt, synthetic construct
  source 1..19: mol_type = other RNA
aagatcatcaggaggaaga

SEQ ID NO: 2493 - RNA, 19 nt, synthetic construct
  source 1..19: mol_type = other RNA
agatcatcaggaggaagaa

SEQ ID NO: 2494 - RNA, 19 nt, synthetic construct
  source 1..19: mol_type = other RNA
gatcatcaggaggaagaag

SEQ ID NO: 2495 - RNA, 19 nt, synthetic construct
  source 1..19: mol_type = other RNA
atcatcaggaggaagaagc

SEQ ID NO: 2496 - RNA, 19 nt, synthetic construct
  source 1..19: mol_type = other RNA
tcatcaggaggaagaagca

SEQ ID NO: 2497 - RNA, 19 nt, synthetic construct
  source 1..19: mol_type = other RNA
catcaggaggaagaagcaa

SEQ ID NO: 2498 - RNA, 19 nt, synthetic construct
  source 1..19: mol_type = other RNA
atcaggaggaagaagcaag

SEQ ID NO: 2499 - RNA, 19 nt, synthetic construct
  source 1..19: mol_type = other RNA
tcaggaggaagaagcaagc

SEQ ID NO: 2500 - RNA, 19 nt, synthetic construct
  source 1..19: mol_type = other RNA
caggaggaagaagcaagct

SEQ ID NO: 2501 - RNA, 19 nt, synthetic construct
  source 1..19: mol_type = other RNA
aggaggaagaagcaagctc

SEQ ID NO: 2502 - RNA, 19 nt, synthetic construct
  source 1..19: mol_type = other RNA
ggaggaagaagcaagctca

SEQ ID NO: 2503 - RNA, 19 nt, synthetic construct
  source 1..19: mol_type = other RNA
gaggaagaagcaagctcag

SEQ ID NO: 2504 - RNA, 19 nt, synthetic construct
  source 1..19: mol_type = other RNA
aggaagaagcaagctcagg

SEQ ID NO: 2505 - RNA, 19 nt, synthetic construct
  source 1..19: mol_type = other RNA
ggaagaagcaagctcaggc

SEQ ID NO: 2506 - RNA, 19 nt, synthetic construct
  source 1..19: mol_type = other RNA
gaagaagcaagctcaggca

SEQ ID NO: 2507 - RNA, 19 nt, synthetic construct
  source 1..19: mol_type = other RNA
aagaagcaagctcaggcaa

SEQ ID NO: 2508 - RNA, 19 nt, synthetic construct
  source 1..19: mol_type = other RNA
agaagcaagctcaggcaaa

SEQ ID NO: 2509 - RNA, 19 nt, synthetic construct
  source 1..19: mol_type = other RNA
gaagcaagctcaggcaaac

SEQ ID NO: 2510 - RNA, 19 nt, synthetic construct
  source 1..19: mol_type = other RNA
aagcaagctcaggcaaacg

SEQ ID NO: 2511 - RNA, 19 nt, synthetic construct
  source 1..19: mol_type = other RNA
agcaagctcaggcaaacgg

SEQ ID NO: 2512 - RNA, 19 nt, synthetic construct
  source 1..19: mol_type = other RNA
gcaagctcaggcaaacgga

SEQ ID NO: 2513 - RNA, 19 nt, synthetic construct
  source 1..19: mol_type = other RNA
caagctcaggcaaacggag

SEQ ID NO: 2514 - RNA, 19 nt, synthetic construct
  source 1..19: mol_type = other RNA
aagctcaggcaaacggagt

SEQ ID NO: 2515 - RNA, 19 nt, synthetic construct
  source 1..19: mol_type = other RNA
agctcaggcaaacggagta

SEQ ID NO: 2516 - RNA, 19 nt, synthetic construct
  source 1..19: mol_type = other RNA
gctcaggcaaacggagtaa

SEQ ID NO: 2517 - RNA, 19 nt, synthetic construct
  source 1..19: mol_type = other RNA
ctcaggcaaacggagtaag

SEQ ID NO: 2518 - RNA, 19 nt, synthetic construct
  source 1..19: mol_type = other RNA
tcaggcaaacggagtaagc

SEQ ID NO: 2519 - RNA, 19 nt, synthetic construct
  source 1..19: mol_type = other RNA
caggcaaacggagtaagcc

SEQ ID NO: 2520 - RNA, 19 nt, synthetic construct
  source 1..19: mol_type = other RNA
aggcaaacggagtaagcca

SEQ ID NO: 2521 - RNA, 19 nt, synthetic construct
  source 1..19: mol_type = other RNA
ggcaaacggagtaagccat

SEQ ID NO: 2522 - RNA, 19 nt, synthetic construct
  source 1..19: mol_type = other RNA
gcaaacggagtaagccata

SEQ ID NO: 2523 - RNA, 19 nt, synthetic construct
  source 1..19: mol_type = other RNA
caaacggagtaagccataa

SEQ ID NO: 2524 - RNA, 19 nt, synthetic construct
  source 1..19: mol_type = other RNA
aaacggagtaagccataat

SEQ ID NO: 2525 - RNA, 19 nt, synthetic construct
  source 1..19: mol_type = other RNA
aacggagtaagccataata

SEQ ID NO: 2526 - RNA, 19 nt, synthetic construct
  source 1..19: mol_type = other RNA
acggagtaagccataatat

SEQ ID NO: 2527 - RNA, 19 nt, synthetic construct
  source 1..19: mol_type = other RNA
cggagtaagccataatatt

SEQ ID NO: 2528 - RNA, 19 nt, synthetic construct
  source 1..19: mol_type = other RNA
ggagtaagccataatatta

SEQ ID NO: 2529 - RNA, 19 nt, synthetic construct
  source 1..19: mol_type = other RNA
gagtaagccataatattac

SEQ ID NO: 2530 - RNA, 19 nt, synthetic construct
  source 1..19: mol_type = other RNA
agtaagccataatattacc

SEQ ID NO: 2531 - RNA, 19 nt, synthetic construct
  source 1..19: mol_type = other RNA
gtaagccataatattacct

SEQ ID NO: 2532 - RNA, 19 nt, synthetic construct
  source 1..19: mol_type = other RNA
taagccataatattacctt

SEQ ID NO: 2533 - RNA, 19 nt, synthetic construct
  source 1..19: mol_type = other RNA
aagccataatattaccttt

SEQ ID NO: 2534 - RNA, 19 nt, synthetic construct
  source 1..19: mol_type = other RNA
agccataatattacctttg

SEQ ID NO: 2535 - RNA, 19 nt, synthetic construct
  source 1..19: mol_type = other RNA
gccataatattacctttga

SEQ ID NO: 2536 - RNA, 19 nt, synthetic construct
  source 1..19: mol_type = other RNA
ccataatattacctttgaa

SEQ ID NO: 2537 - RNA, 19 nt, synthetic construct
  source 1..19: mol_type = other RNA
cataatattacctttgaaa

SEQ ID NO: 2538 - RNA, 19 nt, synthetic construct
  source 1..19: mol_type = other RNA
ataatattacctttgaaag

SEQ ID NO: 2539 - RNA, 19 nt, synthetic construct
  source 1..19: mol_type = other RNA
taatattacctttgaaagt

SEQ ID NO: 2540 - RNA, 19 nt, synthetic construct
  source 1..19: mol_type = other RNA
aatattacctttgaaagtc

SEQ ID NO: 2541 - RNA, 19 nt, synthetic construct
  source 1..19: mol_type = other RNA
atattacctttgaaagtcc

SEQ ID NO: 2542 - RNA, 19 nt, synthetic construct
  source 1..19: mol_type = other RNA
tattacctttgaaagtcca

SEQ ID NO: 2543 - RNA, 19 nt, synthetic construct
  source 1..19: mol_type = other RNA
attacctttgaaagtccac

SEQ ID NO: 2544 - RNA, 19 nt, synthetic construct
  source 1..19: mol_type = other RNA
ttacctttgaaagtccacc

SEQ ID NO: 2545 - RNA, 19 nt, synthetic construct
  source 1..19: mol_type = other RNA
tacctttgaaagtccacct

SEQ ID NO: 2546 - RNA, 19 nt, synthetic construct
  source 1..19: mol_type = other RNA
acctttgaaagtccacctc

SEQ ID NO: 2547 - RNA, 19 nt, synthetic construct
  source 1..19: mol_type = other RNA
cctttgaaagtccacctcc

SEQ ID NO: 2548 - RNA, 19 nt, synthetic construct
  source 1..19: mol_type = other RNA
ctttgaaagtccacctcca

SEQ ID NO: 2549 - RNA, 19 nt, synthetic construct
  source 1..19: mol_type = other RNA
tttgaaagtccacctccac

SEQ ID NO: 2550 - RNA, 19 nt, synthetic construct
  source 1..19: mol_type = other RNA
ttgaaagtccacctccacc

SEQ ID NO: 2551 - RNA, 19 nt, synthetic construct
  source 1..19: mol_type = other RNA
tgaaagtccacctccacca

SEQ ID NO: 2552 - RNA, 19 nt, synthetic construct
  source 1..19: mol_type = other RNA
gaaagtccacctccaccaa

SEQ ID NO: 2553 - RNA, 19 nt, synthetic construct
  source 1..19: mol_type = other RNA
aaagtccacctccaccaat

SEQ ID NO: 2554 - RNA, 19 nt, synthetic construct
  source 1..19: mol_type = other RNA
aagtccacctccaccaatt

SEQ ID NO: 2555 - RNA, 19 nt, synthetic construct
  source 1..19: mol_type = other RNA
agtccacctccaccaattg

SEQ ID NO: 2556 - RNA, 19 nt, synthetic construct
  source 1..19: mol_type = other RNA
gtccacctccaccaattga

SEQ ID NO: 2557 - RNA, 19 nt, synthetic construct
  source 1..19: mol_type = other RNA
tccacctccaccaattgaa

SEQ ID NO: 2558 - RNA, 19 nt, synthetic construct
  source 1..19: mol_type = other RNA
ccacctccaccaattgaat

SEQ ID NO: 2559 - RNA, 19 nt, synthetic construct
  source 1..19: mol_type = other RNA
cacctccaccaattgaatg

SEQ ID NO: 2560 - RNA, 19 nt, synthetic construct
  source 1..19: mol_type = other RNA
acctccaccaattgaatgg

SEQ ID NO: 2561 - RNA, 19 nt, synthetic construct
  source 1..19: mol_type = other RNA
cctccaccaattgaatggc

SEQ ID NO: 2562 - RNA, 19 nt, synthetic construct
  source 1..19: mol_type = other RNA
ctccaccaattgaatggca

SEQ ID NO: 2563 - RNA, 19 nt, synthetic construct
  source 1..19: mol_type = other RNA
tccaccaattgaatggcat

SEQ ID NO: 2564 - RNA, 19 nt, synthetic construct
  source 1..19: mol_type = other RNA
ccaccaattgaatggcata

SEQ ID NO: 2565 - RNA, 19 nt, synthetic construct
  source 1..19: mol_type = other RNA
caccaattgaatggcatat

SEQ ID NO: 2566 - RNA, 19 nt, synthetic construct
  source 1..19: mol_type = other RNA
accaattgaatggcatatc

SEQ ID NO: 2567 - RNA, 19 nt, synthetic construct
  source 1..19: mol_type = other RNA
ccaattgaatggcatatca

SEQ ID NO: 2568 - RNA, 19 nt, synthetic construct
  source 1..19: mol_type = other RNA
caattgaatggcatatcag

SEQ ID NO: 2569 - RNA, 19 nt, synthetic construct
  source 1..19: mol_type = other RNA
aattgaatggcatatcagc

SEQ ID NO: 2570 - RNA, 19 nt, synthetic construct
  source 1..19: mol_type = other RNA
attgaatggcatatcagca

SEQ ID NO: 2571 - RNA, 19 nt, synthetic construct
  source 1..19: mol_type = other RNA
ttgaatggcatatcagcaa

SEQ ID NO: 2572 - RNA, 19 nt, synthetic construct
  source 1..19: mol_type = other RNA
tgaatggcatatcagcaaa

SEQ ID NO: 2573 - RNA, 19 nt, synthetic construct
  source 1..19: mol_type = other RNA
gaatggcatatcagcaaac

SEQ ID NO: 2574 - RNA, 19 nt, synthetic construct
  source 1..19: mol_type = other RNA
aatggcatatcagcaaacc

SEQ ID NO: 2575 - RNA, 19 nt, synthetic construct
  source 1..19: mol_type = other RNA
atggcatatcagcaaacca

SEQ ID NO: 2576 - RNA, 19 nt, synthetic construct
  source 1..19: mol_type = other RNA
tggcatatcagcaaaccag

SEQ ID NO: 2577 - RNA, 19 nt, synthetic construct
  source 1..19: mol_type = other RNA
ggcatatcagcaaaccagg

SEQ ID NO: 2578 - RNA, 19 nt, synthetic construct
  source 1..19: mol_type = other RNA
gcatatcagcaaaccagga

SEQ ID NO: 2579 - RNA, 19 nt, synthetic construct
  source 1..19: mol_type = other RNA
catatcagcaaaccaggac

SEQ ID NO: 2580 - RNA, 19 nt, synthetic construct
  source 1..19: mol_type = other RNA
atatcagcaaaccaggaca

SEQ ID NO: 2581 - RNA, 19 nt, synthetic construct
  source 1..19: mol_type = other RNA
tatcagcaaaccaggacag

SEQ ID NO: 2582 - RNA, 19 nt, synthetic construct
  source 1..19: mol_type = other RNA
atcagcaaaccaggacagt

SEQ ID NO: 2583 - RNA, 19 nt, synthetic construct
  source 1..19: mol_type = other RNA
tcagcaaaccaggacagtt

SEQ ID NO: 2584 - RNA, 19 nt, synthetic construct
  source 1..19: mol_type = other RNA
cagcaaaccaggacagttt

SEQ ID NO: 2585 - RNA, 19 nt, synthetic construct
  source 1..19: mol_type = other RNA
agcaaaccaggacagtttg

SEQ ID NO: 2586 - RNA, 19 nt, synthetic construct
  source 1..19: mol_type = other RNA
gcaaaccaggacagtttga

SEQ ID NO: 2587 - RNA, 19 nt, synthetic construct
  source 1..19: mol_type = other RNA
caaaccaggacagtttgaa

SEQ ID NO: 2588 - RNA, 19 nt, synthetic construct
  source 1..19: mol_type = other RNA
aaaccaggacagtttgaaa

SEQ ID NO: 2589 - RNA, 19 nt, synthetic construct
  source 1..19: mol_type = other RNA
aaccaggacagtttgaaac

SEQ ID NO: 2590 - RNA, 19 nt, synthetic construct
  source 1..19: mol_type = other RNA
accaggacagtttgaaaca

SEQ ID NO: 2591 - RNA, 19 nt, synthetic construct
  source 1..19: mol_type = other RNA
ccaggacagtttgaaacat

SEQ ID NO: 2592 - RNA, 19 nt, synthetic construct
  source 1..19: mol_type = other RNA
caggacagtttgaaacatt

SEQ ID NO: 2593 - RNA, 19 nt, synthetic construct
  source 1..19: mol_type = other RNA
aggacagtttgaaacattt

SEQ ID NO: 2594 - RNA, 19 nt, synthetic construct
  source 1..19: mol_type = other RNA
ggacagtttgaaacatttg

SEQ ID NO: 2595 - RNA, 19 nt, synthetic construct
  source 1..19: mol_type = other RNA
gacagtttgaaacatttga

SEQ ID NO: 2596 - RNA, 19 nt, synthetic construct
  source 1..19: mol_type = other RNA
acagtttgaaacatttgat

SEQ ID NO: 2597 - RNA, 19 nt, synthetic construct
  source 1..19: mol_type = other RNA
cagtttgaaacatttgatc

SEQ ID NO: 2598 - RNA, 19 nt, synthetic construct
  source 1..19: mol_type = other RNA
agtttgaaacatttgatct

SEQ ID NO: 2599 - RNA, 19 nt, synthetic construct
  source 1..19: mol_type = other RNA
gtttgaaacatttgatctc

SEQ ID NO: 2600 - RNA, 19 nt, synthetic construct
  source 1..19: mol_type = other RNA
tttgaaacatttgatctca

SEQ ID NO: 2601 - RNA, 19 nt, synthetic construct
  source 1..19: mol_type = other RNA
ttgaaacatttgatctcat

SEQ ID NO: 2602 - RNA, 19 nt, synthetic construct
  source 1..19: mol_type = other RNA
tgaaacatttgatctcatg

SEQ ID NO: 2603 - RNA, 19 nt, synthetic construct
  source 1..19: mol_type = other RNA
gaaacatttgatctcatga

SEQ ID NO: 2604 - RNA, 19 nt, synthetic construct
  source 1..19: mol_type = other RNA
aaacatttgatctcatgac

SEQ ID NO: 2605 - RNA, 19 nt, synthetic construct
  source 1..19: mol_type = other RNA
aacatttgatctcatgaca

SEQ ID NO: 2606 - RNA, 19 nt, synthetic construct
  source 1..19: mol_type = other RNA
acatttgatctcatgacac

SEQ ID NO: 2607 - RNA, 19 nt, synthetic construct
  source 1..19: mol_type = other RNA
catttgatctcatgacact

SEQ ID NO: 2608 - RNA, 19 nt, synthetic construct
  source 1..19: mol_type = other RNA
atttgatctcatgacactt

SEQ ID NO: 2609 - RNA, 19 nt, synthetic construct
  source 1..19: mol_type = other RNA
tttgatctcatgacacttc

SEQ ID NO: 2610 - RNA, 19 nt, synthetic construct
  source 1..19: mol_type = other RNA
ttgatctcatgacacttca

SEQ ID NO: 2611 - RNA, 19 nt, synthetic construct
  source 1..19: mol_type = other RNA
tgatctcatgacacttcat

SEQ ID NO: 2612 - RNA, 19 nt, synthetic construct
  source 1..19: mol_type = other RNA
gatctcatgacacttcatc

SEQ ID NO: 2613 - RNA, 19 nt, synthetic construct
  source 1..19: mol_type = other RNA
atctcatgacacttcatcc

SEQ ID NO: 2614 - RNA, 19 nt, synthetic construct
  source 1..19: mol_type = other RNA
tctcatgacacttcatcca

SEQ ID NO: 2615 - RNA, 19 nt, synthetic construct
  source 1..19: mol_type = other RNA
ctcatgacacttcatccaa

SEQ ID NO: 2616 - RNA, 19 nt, synthetic construct
  source 1..19: mol_type = other RNA
tcatgacacttcatccaat

SEQ ID NO: 2617 - RNA, 19 nt, synthetic construct
  source 1..19: mol_type = other RNA
catgacacttcatccaata

SEQ ID NO: 2618 - RNA, 19 nt, synthetic construct
  source 1..19: mol_type = other RNA
atgacacttcatccaatag

SEQ ID NO: 2619 - RNA, 19 nt, synthetic construct
  source 1..19: mol_type = other RNA
tgacacttcatccaataga

SEQ ID NO: 2620 - RNA, 19 nt, synthetic construct
  source 1..19: mol_type = other RNA
gacacttcatccaatagaa

SEQ ID NO: 2621 - RNA, 19 nt, synthetic construct
  source 1..19: mol_type = other RNA
acacttcatccaatagaaa

SEQ ID NO: 2622 - RNA, 19 nt, synthetic construct
  source 1..19: mol_type = other RNA
cacttcatccaatagaaat

SEQ ID NO: 2623 - RNA, 19 nt, synthetic construct
  source 1..19: mol_type = other RNA
acttcatccaatagaaatt

SEQ ID NO: 2624 - RNA, 19 nt, synthetic construct
  source 1..19: mol_type = other RNA
cttcatccaatagaaattg

SEQ ID NO: 2625 - RNA, 19 nt, synthetic construct
  source 1..19: mol_type = other RNA
ttcatccaatagaaattgc

SEQ ID NO: 2626 - RNA, 19 nt, synthetic construct
  source 1..19: mol_type = other RNA
tcatccaatagaaattgca

SEQ ID NO: 2627 - RNA, 19 nt, synthetic construct
  source 1..19: mol_type = other RNA
catccaatagaaattgcac

SEQ ID NO: 2628 - RNA, 19 nt, synthetic construct
  source 1..19: mol_type = other RNA
atccaatagaaattgcacg

SEQ ID NO: 2629 - RNA, 19 nt, synthetic construct
  source 1..19: mol_type = other RNA
tccaatagaaattgcacgt

SEQ ID NO: 2630 - RNA, 19 nt, synthetic construct
  source 1..19: mol_type = other RNA
ccaatagaaattgcacgtc

SEQ ID NO: 2631 - RNA, 19 nt, synthetic construct
  source 1..19: mol_type = other RNA
caatagaaattgcacgtca

SEQ ID NO: 2632 - RNA, 19 nt, synthetic construct
  source 1..19: mol_type = other RNA
aatagaaattgcacgtcag

SEQ ID NO: 2633 - RNA, 19 nt, synthetic construct
  source 1..19: mol_type = other RNA
atagaaattgcacgtcagc

SEQ ID NO: 2634 - RNA, 19 nt, synthetic construct
  source 1..19: mol_type = other RNA
tagaaattgcacgtcagct

SEQ ID NO: 2635 - RNA, 19 nt, synthetic construct
  source 1..19: mol_type = other RNA
agaaattgcacgtcagctg

SEQ ID NO: 2636 - RNA, 19 nt, synthetic construct
  source 1..19: mol_type = other RNA
gaaattgcacgtcagctga

SEQ ID NO: 2637 - RNA, 19 nt, synthetic construct
  source 1..19: mol_type = other RNA
aaattgcacgtcagctgac

SEQ ID NO: 2638 - RNA, 19 nt, synthetic construct
  source 1..19: mol_type = other RNA
aattgcacgtcagctgaca

SEQ ID NO: 2639 - RNA, 19 nt, synthetic construct
  source 1..19: mol_type = other RNA
attgcacgtcagctgacac

SEQ ID NO: 2640 - RNA, 19 nt, synthetic construct
  source 1..19: mol_type = other RNA
ttgcacgtcagctgacact

SEQ ID NO: 2641 - RNA, 19 nt, synthetic construct
  source 1..19: mol_type = other RNA
tgcacgtcagctgacactt

SEQ ID NO: 2642 - RNA, 19 nt, synthetic construct
  source 1..19: mol_type = other RNA
gcacgtcagctgacacttt

SEQ ID NO: 2643 - RNA, 19 nt, synthetic construct
  source 1..19: mol_type = other RNA
cacgtcagctgacactttt

SEQ ID NO: 2644 - RNA, 19 nt, synthetic construct
  source 1..19: mol_type = other RNA
acgtcagctgacacttttg

SEQ ID NO: 2645 - RNA, 19 nt, synthetic construct
  source 1..19: mol_type = other RNA
cgtcagctgacacttttgg

SEQ ID NO: 2646 - RNA, 19 nt, synthetic construct
  source 1..19: mol_type = other RNA
gtcagctgacacttttgga

SEQ ID NO: 2647 - RNA, 19 nt, synthetic construct
  source 1..19: mol_type = other RNA
tcagctgacacttttggag

SEQ ID NO: 2648 - RNA, 19 nt, synthetic construct
  source 1..19: mol_type = other RNA
cagctgacacttttggagt

SEQ ID NO: 2649 - RNA, 19 nt, synthetic construct
  source 1..19: mol_type = other RNA
agctgacacttttggagtc

SEQ ID NO: 2650 - RNA, 19 nt, synthetic construct
  source 1..19: mol_type = other RNA
gctgacacttttggagtct

SEQ ID NO: 2651 - RNA, 19 nt, synthetic construct
  source 1..19: mol_type = other RNA
ctgacacttttggagtctg

SEQ ID NO: 2652 - RNA, 19 nt, synthetic construct
  source 1..19: mol_type = other RNA
tgacacttttggagtctga

SEQ ID NO: 2653 - RNA, 19 nt, synthetic construct
  source 1..19: mol_type = other RNA
gacacttttggagtctgat

SEQ ID NO: 2654 - RNA, 19 nt, synthetic construct
  source 1..19: mol_type = other RNA
acacttttggagtctgatc

SEQ ID NO: 2655 - RNA, 19 nt, synthetic construct
  source 1..19: mol_type = other RNA
cacttttggagtctgatct

SEQ ID NO: 2656 - RNA, 19 nt, synthetic construct
  source 1..19: mol_type = other RNA
acttttggagtctgatctt

SEQ ID NO: 2657 - RNA, 19 nt, synthetic construct
  source 1..19: mol_type = other RNA
cttttggagtctgatcttt

SEQ ID NO: 2658 - RNA, 19 nt, synthetic construct
  source 1..19: mol_type = other RNA
ttttggagtctgatcttta

SEQ ID NO: 2659 - RNA, 19 nt, synthetic construct
  source 1..19: mol_type = other RNA
tttggagtctgatctttac

SEQ ID NO: 2660 - RNA, 19 nt, synthetic construct
  source 1..19: mol_type = other RNA
ttggagtctgatctttaca

SEQ ID NO: 2661 - RNA, 19 nt, synthetic construct
  source 1..19: mol_type = other RNA
tggagtctgatctttacag

SEQ ID NO: 2662 - RNA, 19 nt, synthetic construct
  source 1..19: mol_type = other RNA
ggagtctgatctttacagg

SEQ ID NO: 2663 - RNA, 19 nt, synthetic construct
  source 1..19: mol_type = other RNA
gagtctgatctttacagga

SEQ ID NO: 2664 - RNA, 19 nt, synthetic construct
  source 1..19: mol_type = other RNA
agtctgatctttacaggaa

SEQ ID NO: 2665 - RNA, 19 nt, synthetic construct
  source 1..19: mol_type = other RNA
gtctgatctttacaggaaa

SEQ ID NO: 2666 - RNA, 19 nt, synthetic construct
  source 1..19: mol_type = other RNA
tctgatctttacaggaaag

SEQ ID NO: 2667 - RNA, 19 nt, synthetic construct
  source 1..19: mol_type = other RNA
ctgatctttacaggaaagt

SEQ ID NO: 2668 - RNA, 19 nt, synthetic construct
  source 1..19: mol_type = other RNA
tgatctttacaggaaagtt

SEQ ID NO: 2669 - RNA, 19 nt, synthetic construct
  source 1..19: mol_type = other RNA
gatctttacaggaaagttc

SEQ ID NO: 2670 - RNA, 19 nt, synthetic construct
  source 1..19: mol_type = other RNA
atctttacaggaaagttca

SEQ ID NO: 2671 - RNA, 19 nt, synthetic construct
  source 1..19: mol_type = other RNA
tctttacaggaaagttcaa

SEQ ID NO: 2672 - RNA, 19 nt, synthetic construct
  source 1..19: mol_type = other RNA
ctttacaggaaagttcaac

SEQ ID NO: 2673 - RNA, 19 nt, synthetic construct
  source 1..19: mol_type = other RNA
tttacaggaaagttcaacc

SEQ ID NO: 2674 - RNA, 19 nt, synthetic construct
  source 1..19: mol_type = other RNA
ttacaggaaagttcaaccg

SEQ ID NO: 2675 - RNA, 19 nt, synthetic construct
  source 1..19: mol_type = other RNA
tacaggaaagttcaaccgt

SEQ ID NO: 2676 - RNA, 19 nt, synthetic construct
  source 1..19: mol_type = other RNA
acaggaaagttcaaccgtc

SEQ ID NO: 2677 - RNA, 19 nt, synthetic construct
  source 1..19: mol_type = other RNA
caggaaagttcaaccgtct

SEQ ID NO: 2678 - RNA, 19 nt, synthetic construct
  source 1..19: mol_type = other RNA
aggaaagttcaaccgtctg

SEQ ID NO: 2679 - RNA, 19 nt, synthetic construct
  source 1..19: mol_type = other RNA
ggaaagttcaaccgtctga

SEQ ID NO: 2680 - RNA, 19 nt, synthetic construct
  source 1..19: mol_type = other RNA
gaaagttcaaccgtctgaa

SEQ ID NO: 2681 - RNA, 19 nt, synthetic construct
  source 1..19: mol_type = other RNA
aaagttcaaccgtctgaac

SEQ ID NO: 2682 - RNA, 19 nt, synthetic construct
  source 1..19: mol_type = other RNA
aagttcaaccgtctgaact

SEQ ID NO: 2683 - RNA, 19 nt, synthetic construct
  source 1..19: mol_type = other RNA
agttcaaccgtctgaactt

SEQ ID NO: 2684 - RNA, 19 nt, synthetic construct
  source 1..19: mol_type = other RNA
gttcaaccgtctgaacttg

SEQ ID NO: 2685 - RNA, 19 nt, synthetic construct
  source 1..19: mol_type = other RNA
ttcaaccgtctgaacttgt

SEQ ID NO: 2686 - RNA, 19 nt, synthetic construct
  source 1..19: mol_type = other RNA
tcaaccgtctgaacttgta

SEQ ID NO: 2687 - RNA, 19 nt, synthetic construct
  source 1..19: mol_type = other RNA
caaccgtctgaacttgtag

SEQ ID NO: 2688 - RNA, 19 nt, synthetic construct
  source 1..19: mol_type = other RNA
aaccgtctgaacttgtagg

SEQ ID NO: 2689 - RNA, 19 nt, synthetic construct
  source 1..19: mol_type = other RNA
accgtctgaacttgtaggg

SEQ ID NO: 2690 - RNA, 19 nt, synthetic construct
  source 1..19: mol_type = other RNA
ccgtctgaacttgtaggga

SEQ ID NO: 2691 - RNA, 19 nt, synthetic construct
  source 1..19: mol_type = other RNA
cgtctgaacttgtagggag

SEQ ID NO: 2692 - RNA, 19 nt, synthetic construct
  source 1..19: mol_type = other RNA
gtctgaacttgtagggagt

SEQ ID NO: 2693 - RNA, 19 nt, synthetic construct
  source 1..19: mol_type = other RNA
tctgaacttgtagggagtg

SEQ ID NO: 2694 - RNA, 19 nt, synthetic construct
  source 1..19: mol_type = other RNA
ctgaacttgtagggagtgt

SEQ ID NO: 2695 - RNA, 19 nt, synthetic construct
  source 1..19: mol_type = other RNA
tgaacttgtagggagtgtg

SEQ ID NO: 2696 - RNA, 19 nt, synthetic construct
  source 1..19: mol_type = other RNA
gaacttgtagggagtgtgt

SEQ ID NO: 2697 - RNA, 19 nt, synthetic construct
  source 1..19: mol_type = other RNA
aacttgtagggagtgtgtg

SEQ ID NO: 2698 - RNA, 19 nt, synthetic construct
  source 1..19: mol_type = other RNA
acttgtagggagtgtgtgg

SEQ ID NO: 2699 - RNA, 19 nt, synthetic construct
  source 1..19: mol_type = other RNA
cttgtagggagtgtgtgga

SEQ ID NO: 2700 - RNA, 19 nt, synthetic construct
  source 1..19: mol_type = other RNA
ttgtagggagtgtgtggac

SEQ ID NO: 2701 - RNA, 19 nt, synthetic construct
  source 1..19: mol_type = other RNA
tgtagggagtgtgtggacc

SEQ ID NO: 2702 - RNA, 19 nt, synthetic construct
  source 1..19: mol_type = other RNA
gtagggagtgtgtggacca

SEQ ID NO: 2703 - RNA, 19 nt, synthetic construct
  source 1..19: mol_type = other RNA
tagggagtgtgtggaccaa

SEQ ID NO: 2704 - RNA, 19 nt, synthetic construct
  source 1..19: mol_type = other RNA
agggagtgtgtggaccaaa

SEQ ID NO: 2705 - RNA, 19 nt, synthetic construct
  source 1..19: mol_type = other RNA
gggagtgtgtggaccaaag

SEQ ID NO: 2706 - RNA, 19 nt, synthetic construct
  source 1..19: mol_type = other RNA
ggagtgtgtggaccaaaga

SEQ ID NO: 2707 - RNA, 19 nt, synthetic construct
  source 1..19: mol_type = other RNA
gagtgtgtggaccaaagaa

SEQ ID NO: 2708 - RNA, 19 nt, synthetic construct
  source 1..19: mol_type = other RNA
agtgtgtggaccaaagaag

SEQ ID NO: 2709 - RNA, 19 nt, synthetic construct
  source 1..19: mol_type = other RNA
gtgtgtggaccaaagaaga

SEQ ID NO: 2710 - RNA, 19 nt, synthetic construct
  source 1..19: mol_type = other RNA
tgtgtggaccaaagaagat

SEQ ID NO: 2711 - RNA, 19 nt, synthetic construct
  source 1..19: mol_type = other RNA
gtgtggaccaaagaagata

SEQ ID NO: 2712 - RNA, 19 nt, synthetic construct
  source 1..19: mol_type = other RNA
tgtggaccaaagaagataa

SEQ ID NO: 2713 - RNA, 19 nt, synthetic construct
  source 1..19: mol_type = other RNA
gtggaccaaagaagataaa

SEQ ID NO: 2714 - RNA, 19 nt, synthetic construct
  source 1..19: mol_type = other RNA
tggaccaaagaagataaag

SEQ ID NO: 2715 - RNA, 19 nt, synthetic construct
  source 1..19: mol_type = other RNA
ggaccaaagaagataaaga

SEQ ID NO: 2716 - RNA, 19 nt, synthetic construct
  source 1..19: mol_type = other RNA
gaccaaagaagataaagaa

SEQ ID NO: 2717 - RNA, 19 nt, synthetic construct
  source 1..19: mol_type = other RNA
accaaagaagataaagaaa

SEQ ID NO: 2718 - RNA, 19 nt, synthetic construct
  source 1..19: mol_type = other RNA
ccaaagaagataaagaaat

SEQ ID NO: 2719 - RNA, 19 nt, synthetic construct
  source 1..19: mol_type = other RNA
caaagaagataaagaaata

SEQ ID NO: 2720 - RNA, 19 nt, synthetic construct
  source 1..19: mol_type = other RNA
aaagaagataaagaaataa

SEQ ID NO: 2721 - RNA, 19 nt, synthetic construct
  source 1..19: mol_type = other RNA
aagaagataaagaaataaa

SEQ ID NO: 2722 - RNA, 19 nt, synthetic construct
  source 1..19: mol_type = other RNA
agaagataaagaaataaat

SEQ ID NO: 2723 - RNA, 19 nt, synthetic construct
  source 1..19: mol_type = other RNA
gaagataaagaaataaatt

SEQ ID NO: 2724 - RNA, 19 nt, synthetic construct
  source 1..19: mol_type = other RNA
aagataaagaaataaattc

SEQ ID NO: 2725 - RNA, 19 nt, synthetic construct
  source 1..19: mol_type = other RNA
agataaagaaataaattct

SEQ ID NO: 2726 - RNA, 19 nt, synthetic construct
  source 1..19: mol_type = other RNA
gataaagaaataaattctc

SEQ ID NO: 2727 - RNA, 19 nt, synthetic construct
  source 1..19: mol_type = other RNA
ataaagaaataaattctcc

SEQ ID NO: 2728 - RNA, 19 nt, synthetic construct
  source 1..19: mol_type = other RNA
taaagaaataaattctcca

SEQ ID NO: 2729 - RNA, 19 nt, synthetic construct
  source 1..19: mol_type = other RNA
aaagaaataaattctccaa

SEQ ID NO: 2730 - RNA, 19 nt, synthetic construct
  source 1..19: mol_type = other RNA
aagaaataaattctccaaa

SEQ ID NO: 2731 - RNA, 19 nt, synthetic construct
  source 1..19: mol_type = other RNA
agaaataaattctccaaat

SEQ ID NO: 2732 - RNA, 19 nt, synthetic construct
  source 1..19: mol_type = other RNA
gaaataaattctccaaatt

SEQ ID NO: 2733 - RNA, 19 nt, synthetic construct
  source 1..19: mol_type = other RNA
aaataaattctccaaattt

SEQ ID NO: 2734 - RNA, 19 nt, synthetic construct
  source 1..19: mol_type = other RNA
aataaattctccaaattta

SEQ ID NO: 2735 - RNA, 19 nt, synthetic construct
  source 1..19: mol_type = other RNA
ataaattctccaaatttat

SEQ ID NO: 2736 - RNA, 19 nt, synthetic construct
  source 1..19: mol_type = other RNA
taaattctccaaatttatt

SEQ ID NO: 2737 - RNA, 19 nt, synthetic construct
  source 1..19: mol_type = other RNA
aaattctccaaatttatta

SEQ ID NO: 2738 - RNA, 19 nt, synthetic construct
  source 1..19: mol_type = other RNA
aattctccaaatttattaa

SEQ ID NO: 2739 - RNA, 19 nt, synthetic construct
  source 1..19: mol_type = other RNA
attctccaaatttattaaa

SEQ ID NO: 2740 - RNA, 19 nt, synthetic construct
  source 1..19: mol_type = other RNA
ttctccaaatttattaaaa

SEQ ID NO: 2741 - RNA, 19 nt, synthetic construct
  source 1..19: mol_type = other RNA
tctccaaatttattaaaaa

SEQ ID NO: 2742 - RNA, 19 nt, synthetic construct
  source 1..19: mol_type = other RNA
ctccaaatttattaaaaat

SEQ ID NO: 2743 - RNA, 19 nt, synthetic construct
  source 1..19: mol_type = other RNA
tccaaatttattaaaaatg

SEQ ID NO: 2744 - RNA, 19 nt, synthetic construct
  source 1..19: mol_type = other RNA
ccaaatttattaaaaatga

SEQ ID NO: 2745 - RNA, 19 nt, synthetic construct
  source 1..19: mol_type = other RNA
caaatttattaaaaatgat

SEQ ID NO: 2746 - RNA, 19 nt, synthetic construct
  source 1..19: mol_type = other RNA
aaatttattaaaaatgatt

SEQ ID NO: 2747 - RNA, 19 nt, synthetic construct
  source 1..19: mol_type = other RNA
aatttattaaaaatgattc

SEQ ID NO: 2748 - RNA, 19 nt, synthetic construct
  source 1..19: mol_type = other RNA
atttattaaaaatgattcg

SEQ ID NO: 2749 - RNA, 19 nt, synthetic construct
  source 1..19: mol_type = other RNA
tttattaaaaatgattcgc

SEQ ID NO: 2750 - RNA, 19 nt, synthetic construct
  source 1..19: mol_type = other RNA
ttattaaaaatgattcgcc

SEQ ID NO: 2751 - RNA, 19 nt, synthetic construct
  source 1..19: mol_type = other RNA
tattaaaaatgattcgcca

SEQ ID NO: 2752 - RNA, 19 nt, synthetic construct
  source 1..19: mol_type = other RNA
attaaaaatgattcgccat

SEQ ID NO: 2753 - RNA, 19 nt, synthetic construct
  source 1..19: mol_type = other RNA
ttaaaaatgattcgccata

SEQ ID NO: 2754 - RNA, 19 nt, synthetic construct
  source 1..19: mol_type = other RNA
taaaaatgattcgccatac

SEQ ID NO: 2755 - RNA, 19 nt, synthetic construct
  source 1..19: mol_type = other RNA
aaaaatgattcgccatacc

SEQ ID NO: 2756 - RNA, 19 nt, synthetic construct
  source 1..19: mol_type = other RNA
aaaatgattcgccatacca

SEQ ID NO: 2757 - RNA, 19 nt, synthetic construct
  source 1..19: mol_type = other RNA
aaatgattcgccataccac

SEQ ID NO: 2758 - RNA, 19 nt, synthetic construct
  source 1..19: mol_type = other RNA
aatgattcgccataccaca

SEQ ID NO: 2759 - RNA, 19 nt, synthetic construct
  source 1..19: mol_type = other RNA
atgattcgccataccacaa

SEQ ID NO: 2760 - RNA, 19 nt, synthetic construct
  source 1..19: mol_type = other RNA
tgattcgccataccacaaa

SEQ ID NO: 2761 - RNA, 19 nt, synthetic construct
  source 1..19: mol_type = other RNA
gattcgccataccacaaat

SEQ ID NO: 2762 - RNA, 19 nt, synthetic construct
  source 1..19: mol_type = other RNA
attcgccataccacaaatc

SEQ ID NO: 2763 - RNA, 19 nt, synthetic construct
  source 1..19: mol_type = other RNA
ttcgccataccacaaatct

SEQ ID NO: 2764 - RNA, 19 nt, synthetic construct
  source 1..19: mol_type = other RNA
tcgccataccacaaatctc

SEQ ID NO: 2765 - RNA, 19 nt, synthetic construct
  source 1..19: mol_type = other RNA
cgccataccacaaatctca

SEQ ID NO: 2766 - RNA, 19 nt, synthetic construct
  source 1..19: mol_type = other RNA
gccataccacaaatctcac

SEQ ID NO: 2767 - RNA, 19 nt, synthetic construct
  source 1..19: mol_type = other RNA
ccataccacaaatctcacc

SEQ ID NO: 2768 - RNA, 19 nt, synthetic construct
  source 1..19: mol_type = other RNA
cataccacaaatctcaccc

SEQ ID NO: 2769 - RNA, 19 nt, synthetic construct
  source 1..19: mol_type = other RNA
ataccacaaatctcaccct

SEQ ID NO: 2770 - RNA, 19 nt, synthetic construct
  source 1..19: mol_type = other RNA
taccacaaatctcaccctc

SEQ ID NO: 2771 - RNA, 19 nt, synthetic construct
  source 1..19: mol_type = other RNA
accacaaatctcaccctct

SEQ ID NO: 2772 - RNA, 19 nt, synthetic construct
  source 1..19: mol_type = other RNA
ccacaaatctcaccctctg

SEQ ID NO: 2773 - RNA, 19 nt, synthetic construct
  source 1..19: mol_type = other RNA
cacaaatctcaccctctgg

SEQ ID NO: 2774 - RNA, 19 nt, synthetic construct
  source 1..19: mol_type = other RNA
acaaatctcaccctctggt

SEQ ID NO: 2775 - RNA, 19 nt, synthetic construct
  source 1..19: mol_type = other RNA
caaatctcaccctctggtt

SEQ ID NO: 2776 - RNA, 19 nt, synthetic construct
  source 1..19: mol_type = other RNA
aaatctcaccctctggttt

SEQ ID NO: 2777 - RNA, 19 nt, synthetic construct
  source 1..19: mol_type = other RNA
aatctcaccctctggtttg

SEQ ID NO: 2778 - RNA, 19 nt, synthetic construct
  source 1..19: mol_type = other RNA
atctcaccctctggtttga

SEQ ID NO: 2779 - RNA, 19 nt, synthetic construct
  source 1..19: mol_type = other RNA
tctcaccctctggtttgaa

SEQ ID NO: 2780 - RNA, 19 nt, synthetic construct
  source 1..19: mol_type = other RNA
ctcaccctctggtttgaaa

SEQ ID NO: 2781 - RNA, 19 nt, synthetic construct
  source 1..19: mol_type = other RNA
tcaccctctggtttgaaaa

SEQ ID NO: 2782 - RNA, 19 nt, synthetic construct
  source 1..19: mol_type = other RNA
caccctctggtttgaaaaa

SEQ ID NO: 2783 - RNA, 19 nt, synthetic construct
  source 1..19: mol_type = other RNA
accctctggtttgaaaaat

SEQ ID NO: 2784 - RNA, 19 nt, synthetic construct
  source 1..19: mol_type = other RNA
ccctctggtttgaaaaatg

SEQ ID NO: 2785 - RNA, 19 nt, synthetic construct
  source 1..19: mol_type = other RNA
cctctggtttgaaaaatgc

SEQ ID NO: 2786 - RNA, 19 nt, synthetic construct
  source 1..19: mol_type = other RNA
ctctggtttgaaaaatgca

SEQ ID NO: 2787 - RNA, 19 nt, synthetic construct
  source 1..19: mol_type = other RNA
tctggtttgaaaaatgcat

SEQ ID NO: 2788 - RNA, 19 nt, synthetic construct
  source 1..19: mol_type = other RNA
ctggtttgaaaaatgcatt

SEQ ID NO: 2789 - RNA, 19 nt, synthetic construct
  source 1..19: mol_type = other RNA
tggtttgaaaaatgcattg

SEQ ID NO: 2790 - RNA, 19 nt, synthetic construct
  source 1..19: mol_type = other RNA
ggtttgaaaaatgcattgt

SEQ ID NO: 2791 - RNA, 19 nt, synthetic construct
  source 1..19: mol_type = other RNA
gtttgaaaaatgcattgtg

SEQ ID NO: 2792 - RNA, 19 nt, synthetic construct
  source 1..19: mol_type = other RNA
tttgaaaaatgcattgtgg

SEQ ID NO: 2793 - RNA, 19 nt, synthetic construct
  source 1..19: mol_type = other RNA
ttgaaaaatgcattgtgga

SEQ ID NO: 2794 - RNA, 19 nt, synthetic construct
  source 1..19: mol_type = other RNA
tgaaaaatgcattgtggaa

SEQ ID NO: 2795 - RNA, 19 nt, synthetic construct
  source 1..19: mol_type = other RNA
gaaaaatgcattgtggaag

SEQ ID NO: 2796 - RNA, 19 nt, synthetic construct
  source 1..19: mol_type = other RNA
aaaaatgcattgtggaagc

SEQ ID NO: 2797 - RNA, 19 nt, synthetic construct
  source 1..19: mol_type = other RNA
aaaatgcattgtggaagca

SEQ ID NO: 2798 - RNA, 19 nt, synthetic construct
  source 1..19: mol_type = other RNA
aaatgcattgtggaagcag

SEQ ID NO: 2799 - RNA, 19 nt, synthetic construct
  source 1..19: mol_type = other RNA
aatgcattgtggaagcaga

SEQ ID NO: 2800 - RNA, 19 nt, synthetic construct
  source 1..19: mol_type = other RNA
atgcattgtggaagcagaa

SEQ ID NO: 2801 - RNA, 19 nt, synthetic construct
  source 1..19: mol_type = other RNA
tgcattgtggaagcagaaa

SEQ ID NO: 2802 - RNA, 19 nt, synthetic construct
  source 1..19: mol_type = other RNA
gcattgtggaagcagaaaa

SEQ ID NO: 2803 - RNA, 19 nt, synthetic construct
  source 1..19: mol_type = other RNA
cattgtggaagcagaaaat

SEQ ID NO: 2804 - RNA, 19 nt, synthetic construct
  source 1..19: mol_type = other RNA
attgtggaagcagaaaatt

SEQ ID NO: 2805 - RNA, 19 nt, synthetic construct
  source 1..19: mol_type = other RNA
ttgtggaagcagaaaattt

SEQ ID NO: 2806 - RNA, 19 nt, synthetic construct
  source 1..19: mol_type = other RNA
tgtggaagcagaaaatttt

SEQ ID NO: 2807 - RNA, 19 nt, synthetic construct
  source 1..19: mol_type = other RNA
gtggaagcagaaaattttg

SEQ ID NO: 2808 - RNA, 19 nt, synthetic construct
  source 1..19: mol_type = other RNA
tggaagcagaaaattttga

SEQ ID NO: 2809 - RNA, 19 nt, synthetic construct
  source 1..19: mol_type = other RNA
ggaagcagaaaattttgaa

SEQ ID NO: 2810 - RNA, 19 nt, synthetic construct
  source 1..19: mol_type = other RNA
gaagcagaaaattttgaag

SEQ ID NO: 2811 - RNA, 19 nt, synthetic construct
  source 1..19: mol_type = other RNA
aagcagaaaattttgaaga

SEQ ID NO: 2812 - RNA, 19 nt, synthetic construct
  source 1..19: mol_type = other RNA
agcagaaaattttgaagaa

SEQ ID NO: 2813 - RNA, 19 nt, synthetic construct
  source 1..19: mol_type = other RNA
gcagaaaattttgaagaac

SEQ ID NO: 2814 - RNA, 19 nt, synthetic construct
  source 1..19: mol_type = other RNA
cagaaaattttgaagaacg

SEQ ID NO: 2815 - RNA, 19 nt, synthetic construct
  source 1..19: mol_type = other RNA
agaaaattttgaagaacgg

SEQ ID NO: 2816 - RNA, 19 nt, synthetic construct
  source 1..19: mol_type = other RNA
gaaaattttgaagaacggg

SEQ ID NO: 2817 - RNA, 19 nt, synthetic construct
  source 1..19: mol_type = other RNA
aaaattttgaagaacgggt

SEQ ID NO: 2818 - RNA, 19 nt, synthetic construct
  source 1..19: mol_type = other RNA
aaattttgaagaacgggtg

SEQ ID NO: 2819 - RNA, 19 nt, synthetic construct
  source 1..19: mol_type = other RNA
aattttgaagaacgggtgg

SEQ ID NO: 2820 - RNA, 19 nt, synthetic construct
  source 1..19: mol_type = other RNA
attttgaagaacgggtggc

SEQ ID NO: 2821 - RNA, 19 nt, synthetic construct
  source 1..19: mol_type = other RNA
ttttgaagaacgggtggca

SEQ ID NO: 2822 - RNA, 19 nt, synthetic construct
  source 1..19: mol_type = other RNA
tttgaagaacgggtggcag

SEQ ID NO: 2823 - RNA, 19 nt, synthetic construct
  source 1..19: mol_type = other RNA
ttgaagaacgggtggcagt

SEQ ID NO: 2824 - RNA, 19 nt, synthetic construct
  source 1..19: mol_type = other RNA
tgaagaacgggtggcagta

SEQ ID NO: 2825 - RNA, 19 nt, synthetic construct
  source 1..19: mol_type = other RNA
gaagaacgggtggcagtac

SEQ ID NO: 2826 - RNA, 19 nt, synthetic construct
  source 1..19: mol_type = other RNA
aagaacgggtggcagtact

SEQ ID NO: 2827 - RNA, 19 nt, synthetic construct
  source 1..19: mol_type = other RNA
agaacgggtggcagtacta

SEQ ID NO: 2828 - RNA, 19 nt, synthetic construct
  source 1..19: mol_type = other RNA
gaacgggtggcagtactaa

SEQ ID NO: 2829 - RNA, 19 nt, synthetic construct
  source 1..19: mol_type = other RNA
aacgggtggcagtactaag

SEQ ID NO: 2830 - RNA, 19 nt, synthetic construct
  source 1..19: mol_type = other RNA
acgggtggcagtactaagt

SEQ ID NO: 2831 - RNA, 19 nt, synthetic construct
  source 1..19: mol_type = other RNA
cgggtggcagtactaagta

SEQ ID NO: 2832 - RNA, 19 nt, synthetic construct
  source 1..19: mol_type = other RNA
gggtggcagtactaagtag

SEQ ID NO: 2833 - RNA, 19 nt, synthetic construct
  source 1..19: mol_type = other RNA
ggtggcagtactaagtaga

SEQ ID NO: 2834 - RNA, 19 nt, synthetic construct
  source 1..19: mol_type = other RNA
gtggcagtactaagtagaa

SEQ ID NO: 2835 - RNA, 19 nt, synthetic construct
  source 1..19: mol_type = other RNA
tggcagtactaagtagaat

SEQ ID NO: 2836 - RNA, 19 nt, synthetic construct
  source 1..19: mol_type = other RNA
ggcagtactaagtagaatt

SEQ ID NO: 2837 - RNA, 19 nt, synthetic construct
  source 1..19: mol_type = other RNA
gcagtactaagtagaatta

SEQ ID NO: 2838 - RNA, 19 nt, synthetic construct
  source 1..19: mol_type = other RNA
cagtactaagtagaattat

SEQ ID NO: 2839 - RNA, 19 nt, synthetic construct
  source 1..19: mol_type = other RNA
agtactaagtagaattata

SEQ ID NO: 2840 - RNA, 19 nt, synthetic construct
  source 1..19: mol_type = other RNA
gtactaagtagaattatag

SEQ ID NO: 2841 - RNA, 19 nt, synthetic construct
  source 1..19: mol_type = other RNA
tactaagtagaattataga

SEQ ID NO: 2842 - RNA, 19 nt, synthetic construct
  source 1..19: mol_type = other RNA
actaagtagaattatagaa

SEQ ID NO: 2843 - RNA, 19 nt, synthetic construct
  source 1..19: mol_type = other RNA
ctaagtagaattatagaaa

SEQ ID NO: 2844 - RNA, 19 nt, synthetic construct
  source 1..19: mol_type = other RNA
taagtagaattatagaaat

SEQ ID NO: 2845 - RNA, 19 nt, synthetic construct
  source 1..19: mol_type = other RNA
aagtagaattatagaaatt

SEQ ID NO: 2846 - RNA, 19 nt, synthetic construct
  source 1..19: mol_type = other RNA
agtagaattatagaaattc

SEQ ID NO: 2847 - RNA, 19 nt, synthetic construct
  source 1..19: mol_type = other RNA
gtagaattatagaaattct

SEQ ID NO: 2848 - RNA, 19 nt, synthetic construct
  source 1..19: mol_type = other RNA
tagaattatagaaattctg

SEQ ID NO: 2849 - RNA, 19 nt, synthetic construct
  source 1..19: mol_type = other RNA
agaattatagaaattctgc

SEQ ID NO: 2850 - RNA, 19 nt, synthetic construct
  source 1..19: mol_type = other RNA
gaattatagaaattctgca

SEQ ID NO: 2851 - RNA, 19 nt, synthetic construct
  source 1..19: mol_type = other RNA
aattatagaaattctgcaa

SEQ ID NO: 2852 - RNA, 19 nt, synthetic construct
  source 1..19: mol_type = other RNA
attatagaaattctgcaag

SEQ ID NO: 2853 - RNA, 19 nt, synthetic construct
  source 1..19: mol_type = other RNA
ttatagaaattctgcaagt

SEQ ID NO: 2854 - RNA, 19 nt, synthetic construct
  source 1..19: mol_type = other RNA
tatagaaattctgcaagtt

SEQ ID NO: 2855 - RNA, 19 nt, synthetic construct
  source 1..19: mol_type = other RNA
atagaaattctgcaagttt

SEQ ID NO: 2856 - RNA, 19 nt, synthetic construct
  source 1..19: mol_type = other RNA
tagaaattctgcaagtttt

SEQ ID NO: 2857 - RNA, 19 nt, synthetic construct
  source 1..19: mol_type = other RNA
agaaattctgcaagttttt

SEQ ID NO: 2858 - RNA, 19 nt, synthetic construct
  source 1..19: mol_type = other RNA
gaaattctgcaagtttttc

SEQ ID NO: 2859 - RNA, 19 nt, synthetic construct
  source 1..19: mol_type = other RNA
aaattctgcaagtttttca

SEQ ID NO: 2860 - RNA, 19 nt, synthetic construct
  source 1..19: mol_type = other RNA
aattctgcaagtttttcaa

SEQ ID NO: 2861 - RNA, 19 nt, synthetic construct
  source 1..19: mol_type = other RNA
attctgcaagtttttcaag

SEQ ID NO: 2862 - RNA, 19 nt, synthetic construct
  source 1..19: mol_type = other RNA
ttctgcaagtttttcaaga

SEQ ID NO: 2863 - RNA, 19 nt, synthetic construct
  source 1..19: mol_type = other RNA
tctgcaagtttttcaagat

SEQ ID NO: 2864 - RNA, 19 nt, synthetic construct
  source 1..19: mol_type = other RNA
ctgcaagtttttcaagatt

SEQ ID NO: 2865 - RNA, 19 nt, synthetic construct
  source 1..19: mol_type = other RNA
tgcaagtttttcaagattt

SEQ ID NO: 2866 - RNA, 19 nt, synthetic construct
  source 1..19: mol_type = other RNA
gcaagtttttcaagatttg

SEQ ID NO: 2867 - RNA, 19 nt, synthetic construct
  source 1..19: mol_type = other RNA
caagtttttcaagatttga

SEQ ID NO: 2868 - RNA, 19 nt, synthetic construct
  source 1..19: mol_type = other RNA
aagtttttcaagatttgaa

SEQ ID NO: 2869 - RNA, 19 nt, synthetic construct
  source 1..19: mol_type = other RNA
agtttttcaagatttgaat

SEQ ID NO: 2870 - RNA, 19 nt, synthetic construct
  source 1..19: mol_type = other RNA
gtttttcaagatttgaata

SEQ ID NO: 2871 - RNA, 19 nt, synthetic construct
  source 1..19: mol_type = other RNA
tttttcaagatttgaataa

SEQ ID NO: 2872 - RNA, 19 nt, synthetic construct
  source 1..19: mol_type = other RNA
ttttcaagatttgaataat

SEQ ID NO: 2873 - RNA, 19 nt, synthetic construct
  source 1..19: mol_type = other RNA
tttcaagatttgaataatt

SEQ ID NO: 2874 - RNA, 19 nt, synthetic construct
  source 1..19: mol_type = other RNA
ttcaagatttgaataattt

SEQ ID NO: 2875 - RNA, 19 nt, synthetic construct
  source 1..19: mol_type = other RNA
tcaagatttgaataatttc

SEQ ID NO: 2876 - RNA, 19 nt, synthetic construct
  source 1..19: mol_type = other RNA
caagatttgaataatttca

SEQ ID NO: 2877 - RNA, 19 nt, synthetic construct
  source 1..19: mol_type = other RNA
aagatttgaataatttcaa

SEQ ID NO: 2878 - RNA, 19 nt, synthetic construct
  source 1..19: mol_type = other RNA
agatttgaataatttcaat

SEQ ID NO: 2879 - RNA, 19 nt, synthetic construct
  source 1..19: mol_type = other RNA
gatttgaataatttcaatg

SEQ ID NO: 2880 - RNA, 19 nt, synthetic construct
  source 1..19: mol_type = other RNA
atttgaataatttcaatgg

SEQ ID NO: 2881 - RNA, 19 nt, synthetic construct
  source 1..19: mol_type = other RNA
tttgaataatttcaatggc

SEQ ID NO: 2882 - RNA, 19 nt, synthetic construct
  source 1..19: mol_type = other RNA
ttgaataatttcaatggcg

SEQ ID NO: 2883 - RNA, 19 nt, synthetic construct
  source 1..19: mol_type = other RNA
tgaataatttcaatggcgt

SEQ ID NO: 2884 - RNA, 19 nt, synthetic construct
  source 1..19: mol_type = other RNA
gaataatttcaatggcgta

SEQ ID NO: 2885 - RNA, 19 nt, synthetic construct
  source 1..19: mol_type = other RNA
aataatttcaatggcgtat

SEQ ID NO: 2886 - RNA, 19 nt, synthetic construct
  source 1..19: mol_type = other RNA
ataatttcaatggcgtatt

SEQ ID NO: 2887 - RNA, 19 nt, synthetic construct
  source 1..19: mol_type = other RNA
taatttcaatggcgtattg

SEQ ID NO: 2888 - RNA, 19 nt, synthetic construct
  source 1..19: mol_type = other RNA
aatttcaatggcgtattgg

SEQ ID NO: 2889 - RNA, 19 nt, synthetic construct
  source 1..19: mol_type = other RNA
atttcaatggcgtattgga

SEQ ID NO: 2890 - RNA, 19 nt, synthetic construct
  source 1..19: mol_type = other RNA
tttcaatggcgtattggag

SEQ ID NO: 2891 - RNA, 19 nt, synthetic construct
  source 1..19: mol_type = other RNA
ttcaatggcgtattggaga

SEQ ID NO: 2892 - RNA, 19 nt, synthetic construct
  source 1..19: mol_type = other RNA
tcaatggcgtattggagat

SEQ ID NO: 2893 - RNA, 19 nt, synthetic construct
  source 1..19: mol_type = other RNA
caatggcgtattggagata

SEQ ID NO: 2894 - RNA, 19 nt, synthetic construct
  source 1..19: mol_type = other RNA
aatggcgtattggagatag

SEQ ID NO: 2895 - RNA, 19 nt, synthetic construct
  source 1..19: mol_type = other RNA
atggcgtattggagatagt

SEQ ID NO: 2896 - RNA, 19 nt, synthetic construct
  source 1..19: mol_type = other RNA
tggcgtattggagatagtc

SEQ ID NO: 2897 - RNA, 19 nt, synthetic construct
  source 1..19: mol_type = other RNA
ggcgtattggagatagtca

SEQ ID NO: 2898 - RNA, 19 nt, synthetic construct
  source 1..19: mol_type = other RNA
gcgtattggagatagtcag

SEQ ID NO: 2899 - RNA, 19 nt, synthetic construct
  source 1..19: mol_type = other RNA
cgtattggagatagtcagt

SEQ ID NO: 2900 - RNA, 19 nt, synthetic construct
  source 1..19: mol_type = other RNA
gtattggagatagtcagtg

SEQ ID NO: 2901 - RNA, 19 nt, synthetic construct
  source 1..19: mol_type = other RNA
tattggagatagtcagtgc

SEQ ID NO: 2902 - RNA, 19 nt, synthetic construct
  source 1..19: mol_type = other RNA
attggagatagtcagtgca

SEQ ID NO: 2903 - RNA, 19 nt, synthetic construct
  source 1..19: mol_type = other RNA
ttggagatagtcagtgcag

SEQ ID NO: 2904 - RNA, 19 nt, synthetic construct
  source 1..19: mol_type = other RNA
tggagatagtcagtgcagt

SEQ ID NO: 2905 - RNA, 19 nt, synthetic construct
  source 1..19: mol_type = other RNA
ggagatagtcagtgcagta

SEQ ID NO: 2906 - RNA, 19 nt, synthetic construct
  source 1..19: mol_type = other RNA
gagatagtcagtgcagtaa

SEQ ID NO: 2907 - RNA, 19 nt, synthetic construct
  source 1..19: mol_type = other RNA
agatagtcagtgcagtaaa

SEQ ID NO: 2908 - RNA, 19 nt, synthetic construct
  source 1..19: mol_type = other RNA
gatagtcagtgcagtaaat

SEQ ID NO: 2909 - RNA, 19 nt, synthetic construct
  source 1..19: mol_type = other RNA
atagtcagtgcagtaaatt

SEQ ID NO: 2910 - RNA, 19 nt, synthetic construct
  source 1..19: mol_type = other RNA
tagtcagtgcagtaaattc

SEQ ID NO: 2911 - RNA, 19 nt, synthetic construct
  source 1..19: mol_type = other RNA
agtcagtgcagtaaattca

SEQ ID NO: 2912 - RNA, 19 nt, synthetic construct
  source 1..19: mol_type = other RNA
gtcagtgcagtaaattcag

SEQ ID NO: 2913 - RNA, 19 nt, synthetic construct
  source 1..19: mol_type = other RNA
tcagtgcagtaaattcagt

SEQ ID NO: 2914 - RNA, 19 nt, synthetic construct
  source 1..19: mol_type = other RNA
cagtgcagtaaattcagtg

SEQ ID NO: 2915 - RNA, 19 nt, synthetic construct
  source 1..19: mol_type = other RNA
agtgcagtaaattcagtgt

SEQ ID NO: 2916 - RNA, 19 nt, synthetic construct
  source 1..19: mol_type = other RNA
gtgcagtaaattcagtgtc

SEQ ID NO: 2917 - RNA, 19 nt, synthetic construct
  source 1..19: mol_type = other RNA
tgcagtaaattcagtgtca

SEQ ID NO: 2918 - RNA, 19 nt, synthetic construct
  source 1..19: mol_type = other RNA
gcagtaaattcagtgtcag

SEQ ID NO: 2919 - RNA, 19 nt, synthetic construct
  source 1..19: mol_type = other RNA
cagtaaattcagtgtcagt

SEQ ID NO: 2920 - RNA, 19 nt, synthetic construct
  source 1..19: mol_type = other RNA
agtaaattcagtgtcagta

SEQ ID NO: 2921 - RNA, 19 nt, synthetic construct
  source 1..19: mol_type = other RNA
gtaaattcagtgtcagtat

SEQ ID NO: 2922 - RNA, 19 nt, synthetic construct
  source 1..19: mol_type = other RNA
taaattcagtgtcagtata

SEQ ID NO: 2923 - RNA, 19 nt, synthetic construct
  source 1..19: mol_type = other RNA
aaattcagtgtcagtatac

SEQ ID NO: 2924 - RNA, 19 nt, synthetic construct
  source 1..19: mol_type = other RNA
aattcagtgtcagtataca

SEQ ID NO: 2925 - RNA, 19 nt, synthetic construct
  source 1..19: mol_type = other RNA
attcagtgtcagtatacag

SEQ ID NO: 2926 - RNA, 19 nt, synthetic construct
  source 1..19: mol_type = other RNA
ttcagtgtcagtatacaga

SEQ ID NO: 2927 - RNA, 19 nt, synthetic construct
  source 1..19: mol_type = other RNA
tcagtgtcagtatacagac

SEQ ID NO: 2928 - RNA, 19 nt, synthetic construct
  source 1..19: mol_type = other RNA
cagtgtcagtatacagact

SEQ ID NO: 2929 - RNA, 19 nt, synthetic construct
  source 1..19: mol_type = other RNA
agtgtcagtatacagacta

SEQ ID NO: 2930 - RNA, 19 nt, synthetic construct
  source 1..19: mol_type = other RNA
gtgtcagtatacagactag

SEQ ID NO: 2931 - RNA, 19 nt, synthetic construct
  source 1..19: mol_type = other RNA
tgtcagtatacagactaga

SEQ ID NO: 2932 - RNA, 19 nt, synthetic construct
  source 1..19: mol_type = other RNA
gtcagtatacagactagac

SEQ ID NO: 2933 - RNA, 19 nt, synthetic construct
  source 1..19: mol_type = other RNA
tcagtatacagactagacc

SEQ ID NO: 2934 - RNA, 19 nt, synthetic construct
  source 1..19: mol_type = other RNA
cagtatacagactagacca

SEQ ID NO: 2935 - RNA, 19 nt, synthetic construct
  source 1..19: mol_type = other RNA
agtatacagactagaccat

SEQ ID NO: 2936 - RNA, 19 nt, synthetic construct
  source 1..19: mol_type = other RNA
gtatacagactagaccata

SEQ ID NO: 2937 - RNA, 19 nt, synthetic construct
  source 1..19: mol_type = other RNA
tatacagactagaccatac

SEQ ID NO: 2938 - RNA, 19 nt, synthetic construct
  source 1..19: mol_type = other RNA
atacagactagaccatacc

SEQ ID NO: 2939 - RNA, 19 nt, synthetic construct
  source 1..19: mol_type = other RNA
tacagactagaccatacct

SEQ ID NO: 2940 - RNA, 19 nt, synthetic construct
  source 1..19: mol_type = other RNA
acagactagaccatacctt

SEQ ID NO: 2941 - RNA, 19 nt, synthetic construct
  source 1..19: mol_type = other RNA
cagactagaccataccttt

SEQ ID NO: 2942 - RNA, 19 nt, synthetic construct
  source 1..19: mol_type = other RNA
agactagaccatacctttg

SEQ ID NO: 2943 - RNA, 19 nt, synthetic construct
  source 1..19: mol_type = other RNA
gactagaccatacctttga

SEQ ID NO: 2944 - RNA, 19 nt, synthetic construct
  source 1..19: mol_type = other RNA
actagaccatacctttgag

SEQ ID NO: 2945 - RNA, 19 nt, synthetic construct
  source 1..19: mol_type = other RNA
ctagaccatacctttgagg

SEQ ID NO: 2946 - RNA, 19 nt, synthetic construct
  source 1..19: mol_type = other RNA
tagaccatacctttgaggc

SEQ ID NO: 2947 - RNA, 19 nt, synthetic construct
  source 1..19: mol_type = other RNA
agaccatacctttgaggca

SEQ ID NO: 2948 - RNA, 19 nt, synthetic construct
  source 1..19: mol_type = other RNA
gaccatacctttgaggcac

SEQ ID NO: 2949 - RNA, 19 nt, synthetic construct
  source 1..19: mol_type = other RNA
accatacctttgaggcact

SEQ ID NO: 2950 - RNA, 19 nt, synthetic construct
  source 1..19: mol_type = other RNA
ccatacctttgaggcactg

SEQ ID NO: 2951 - RNA, 19 nt, synthetic construct
  source 1..19: mol_type = other RNA
catacctttgaggcactgc

SEQ ID NO: 2952 - RNA, 19 nt, synthetic construct
  source 1..19: mol_type = other RNA
atacctttgaggcactgca

SEQ ID NO: 2953 - RNA, 19 nt, synthetic construct
  source 1..19: mol_type = other RNA
tacctttgaggcactgcag

SEQ ID NO: 2954 - RNA, 19 nt, synthetic construct
  source 1..19: mol_type = other RNA
acctttgaggcactgcagg

SEQ ID NO: 2955 - RNA, 19 nt, synthetic construct
  source 1..19: mol_type = other RNA
cctttgaggcactgcagga

SEQ ID NO: 2956 - RNA, 19 nt, synthetic construct
  source 1..19: mol_type = other RNA
ctttgaggcactgcaggaa

SEQ ID NO: 2957 - RNA, 19 nt, synthetic construct
  source 1..19: mol_type = other RNA
tttgaggcactgcaggaaa

SEQ ID NO: 2958 - RNA, 19 nt, synthetic construct
  source 1..19: mol_type = other RNA
ttgaggcactgcaggaaag

SEQ ID NO: 2959 - RNA, 19 nt, synthetic construct
  source 1..19: mol_type = other RNA
tgaggcactgcaggaaagg

SEQ ID NO: 2960 - RNA, 19 nt, synthetic construct
  source 1..19: mol_type = other RNA
gaggcactgcaggaaagga

SEQ ID NO: 2961 - RNA, 19 nt, synthetic construct
  source 1..19: mol_type = other RNA
aggcactgcaggaaaggaa

SEQ ID NO: 2962 - RNA, 19 nt, synthetic construct
  source 1..19: mol_type = other RNA
ggcactgcaggaaaggaaa

SEQ ID NO: 2963 - RNA, 19 nt, synthetic construct
  source 1..19: mol_type = other RNA
gcactgcaggaaaggaaaa

SEQ ID NO: 2964 - RNA, 19 nt, synthetic construct
  source 1..19: mol_type = other RNA
cactgcaggaaaggaaaag

SEQ ID NO: 2965 - RNA, 19 nt, synthetic construct
  source 1..19: mol_type = other RNA
actgcaggaaaggaaaagg

SEQ ID NO: 2966 - RNA, 19 nt, synthetic construct
  source 1..19: mol_type = other RNA
ctgcaggaaaggaaaagga

SEQ ID NO: 2967 - RNA, 19 nt, synthetic construct
  source 1..19: mol_type = other RNA
tgcaggaaaggaaaaggaa

SEQ ID NO: 2968 - RNA, 19 nt, synthetic construct
  source 1..19: mol_type = other RNA
gcaggaaaggaaaaggaaa

SEQ ID NO: 2969 - RNA, 19 nt, synthetic construct
  source 1..19: mol_type = other RNA
caggaaaggaaaaggaaaa

SEQ ID NO: 2970 - RNA, 19 nt, synthetic construct
  source 1..19: mol_type = other RNA
aggaaaggaaaaggaaaat

SEQ ID NO: 2971 - RNA, 19 nt, synthetic construct
  source 1..19: mol_type = other RNA
ggaaaggaaaaggaaaatt

SEQ ID NO: 2972 - RNA, 19 nt, synthetic construct
  source 1..19: mol_type = other RNA
gaaaggaaaaggaaaattt

SEQ ID NO: 2973 - RNA, 19 nt, synthetic construct
  source 1..19: mol_type = other RNA
aaaggaaaaggaaaatttt

SEQ ID NO: 2974 - RNA, 19 nt, synthetic construct
  source 1..19: mol_type = other RNA
aaggaaaaggaaaattttg

SEQ ID NO: 2975 - RNA, 19 nt, synthetic construct
  source 1..19: mol_type = other RNA
aggaaaaggaaaattttgg

SEQ ID NO: 2976 - RNA, 19 nt, synthetic construct
  source 1..19: mol_type = other RNA
ggaaaaggaaaattttgga

SEQ ID NO: 2977 - RNA, 19 nt, synthetic construct
  source 1..19: mol_type = other RNA
gaaaaggaaaattttggac

SEQ ID NO: 2978 - RNA, 19 nt, synthetic construct
  source 1..19: mol_type = other RNA
aaaaggaaaattttggacg

SEQ ID NO: 2979 - RNA, 19 nt, synthetic construct
  source 1..19: mol_type = other RNA
aaaggaaaattttggacga

SEQ ID NO: 2980 - RNA, 19 nt, synthetic construct
  source 1..19: mol_type = other RNA
aaggaaaattttggacgaa

SEQ ID NO: 2981 - RNA, 19 nt, synthetic construct
  source 1..19: mol_type = other RNA
aggaaaattttggacgaag

SEQ ID NO: 2982 - RNA, 19 nt, synthetic construct
  source 1..19: mol_type = other RNA
ggaaaattttggacgaagc

SEQ ID NO: 2983 - RNA, 19 nt, synthetic construct
  source 1..19: mol_type = other RNA
gaaaattttggacgaagct

SEQ ID NO: 2984 - RNA, 19 nt, synthetic construct
  source 1..19: mol_type = other RNA
aaaattttggacgaagctg

SEQ ID NO: 2985 - RNA, 19 nt, synthetic construct
  source 1..19: mol_type = other RNA
aaattttggacgaagctgt

SEQ ID NO: 2986 - RNA, 19 nt, synthetic construct
  source 1..19: mol_type = other RNA
aattttggacgaagctgtg

SEQ ID NO: 2987 - RNA, 19 nt, synthetic construct
  source 1..19: mol_type = other RNA
attttggacgaagctgtgg

SEQ ID NO: 2988 - RNA, 19 nt, synthetic construct
  source 1..19: mol_type = other RNA
ttttggacgaagctgtgga

SEQ ID NO: 2989 - RNA, 19 nt, synthetic construct
  source 1..19: mol_type = other RNA
tttggacgaagctgtggaa

SEQ ID NO: 2990 - RNA, 19 nt, synthetic construct
  source 1..19: mol_type = other RNA
ttggacgaagctgtggaat

SEQ ID NO: 2991 - RNA, 19 nt, synthetic construct
  source 1..19: mol_type = other RNA
tggacgaagctgtggaatt

SEQ ID NO: 2992 - RNA, 19 nt, synthetic construct
  source 1..19: mol_type = other RNA
ggacgaagctgtggaatta

SEQ ID NO: 2993 - RNA, 19 nt, synthetic construct
  source 1..19: mol_type = other RNA
gacgaagctgtggaattaa

SEQ ID NO: 2994 - RNA, 19 nt, synthetic construct
  source 1..19: mol_type = other RNA
acgaagctgtggaattaag

SEQ ID NO: 2995 - RNA, 19 nt, synthetic construct
  source 1..19: mol_type = other RNA
cgaagctgtggaattaagt

SEQ ID NO: 2996 - RNA, 19 nt, synthetic construct
  source 1..19: mol_type = other RNA
gaagctgtggaattaagtc

SEQ ID NO: 2997 - RNA, 19 nt, synthetic construct
  source 1..19: mol_type = other RNA
aagctgtggaattaagtca

SEQ ID NO: 2998 - RNA, 19 nt, synthetic construct
  source 1..19: mol_type = other RNA
agctgtggaattaagtcaa

SEQ ID NO: 2999 - RNA, 19 nt, synthetic construct
  source 1..19: mol_type = other RNA
gctgtggaattaagtcaag

SEQ ID NO: 3000 - RNA, 19 nt, synthetic construct
  source 1..19: mol_type = other RNA
ctgtggaattaagtcaaga

SEQ ID NO: 3001 - RNA, 19 nt, synthetic construct
  source 1..19: mol_type = other RNA
tgtggaattaagtcaagat

SEQ ID NO: 3002 - RNA, 19 nt, synthetic construct
  source 1..19: mol_type = other RNA
gtggaattaagtcaagatc

SEQ ID NO: 3003 - RNA, 19 nt, synthetic construct
  source 1..19: mol_type = other RNA
tggaattaagtcaagatca

SEQ ID NO: 3004 - RNA, 19 nt, synthetic construct
  source 1..19: mol_type = other RNA
ggaattaagtcaagatcac

SEQ ID NO: 3005 - RNA, 19 nt, synthetic construct
  source 1..19: mol_type = other RNA
gaattaagtcaagatcact

SEQ ID NO: 3006 - RNA, 19 nt, synthetic construct
  source 1..19: mol_type = other RNA
aattaagtcaagatcactt

SEQ ID NO: 3007 - RNA, 19 nt, synthetic construct
  source 1..19: mol_type = other RNA
attaagtcaagatcacttt

SEQ ID NO: 3008 - RNA, 19 nt, synthetic construct
  source 1..19: mol_type = other RNA
ttaagtcaagatcacttta

SEQ ID NO: 3009 - RNA, 19 nt, synthetic construct
  source 1..19: mol_type = other RNA
taagtcaagatcactttaa

SEQ ID NO: 3010 - RNA, 19 nt, synthetic construct
  source 1..19: mol_type = other RNA
aagtcaagatcactttaaa

SEQ ID NO: 3011 - RNA, 19 nt, synthetic construct
  source 1..19: mol_type = other RNA
agtcaagatcactttaaaa

SEQ ID NO: 3012 - RNA, 19 nt, synthetic construct
  source 1..19: mol_type = other RNA
gtcaagatcactttaaaaa

SEQ ID NO: 3013 - RNA, 19 nt, synthetic construct
  source 1..19: mol_type = other RNA
tcaagatcactttaaaaaa

SEQ ID NO: 3014 - RNA, 19 nt, synthetic construct
  source 1..19: mol_type = other RNA
caagatcactttaaaaaat

SEQ ID NO: 3015 - RNA, 19 nt, synthetic construct
  source 1..19: mol_type = other RNA
aagatcactttaaaaaata

SEQ ID NO: 3016 - RNA, 19 nt, synthetic construct
  source 1..19: mol_type = other RNA
agatcactttaaaaaatac

SEQ ID NO: 3017 - RNA, 19 nt, synthetic construct
  source 1..19: mol_type = other RNA
gatcactttaaaaaatacc

SEQ ID NO: 3018 - RNA, 19 nt, synthetic construct
  source 1..19: mol_type = other RNA
atcactttaaaaaatacct

SEQ ID NO: 3019 - RNA, 19 nt, synthetic construct
  source 1..19: mol_type = other RNA
tcactttaaaaaataccta

SEQ ID NO: 3020 - RNA, 19 nt, synthetic construct
  source 1..19: mol_type = other RNA
cactttaaaaaatacctag

SEQ ID NO: 3021 - RNA, 19 nt, synthetic construct
  source 1..19: mol_type = other RNA
actttaaaaaatacctagt

SEQ ID NO: 3022 - RNA, 19 nt, synthetic construct
  source 1..19: mol_type = other RNA
ctttaaaaaatacctagta

SEQ ID NO: 3023 - RNA, 19 nt, synthetic construct
  source 1..19: mol_type = other RNA
tttaaaaaatacctagtaa

SEQ ID NO: 3024 - RNA, 19 nt, synthetic construct
  source 1..19: mol_type = other RNA
ttaaaaaatacctagtaaa

SEQ ID NO: 3025 - RNA, 19 nt, synthetic construct
  source 1..19: mol_type = other RNA
taaaaaatacctagtaaaa

SEQ ID NO: 3026 - RNA, 19 nt, synthetic construct
  source 1..19: mol_type = other RNA
aaaaaatacctagtaaaac

SEQ ID NO: 3027 - RNA, 19 nt, synthetic construct
  source 1..19: mol_type = other RNA
aaaaatacctagtaaaact

SEQ ID NO: 3028 - RNA, 19 nt, synthetic construct
  source 1..19: mol_type = other RNA
aaaatacctagtaaaactt

SEQ ID NO: 3029 - RNA, 19 nt, synthetic construct
  source 1..19: mol_type = other RNA
aaatacctagtaaaactta

SEQ ID NO: 3030 - RNA, 19 nt, synthetic construct
  source 1..19: mol_type = other RNA
aatacctagtaaaacttaa

SEQ ID NO: 3031 - RNA, 19 nt, synthetic construct
  source 1..19: mol_type = other RNA
atacctagtaaaacttaag

SEQ ID NO: 3032 - RNA, 19 nt, synthetic construct
  source 1..19: mol_type = other RNA
tacctagtaaaacttaagt

SEQ ID NO: 3033 - RNA, 19 nt, synthetic construct
  source 1..19: mol_type = other RNA
acctagtaaaacttaagtc

SEQ ID NO: 3034 - RNA, 19 nt, synthetic construct
  source 1..19: mol_type = other RNA
cctagtaaaacttaagtca

SEQ ID NO: 3035 - RNA, 19 nt, synthetic construct
  source 1..19: mol_type = other RNA
ctagtaaaacttaagtcaa

SEQ ID NO: 3036 - RNA, 19 nt, synthetic construct
  source 1..19: mol_type = other RNA
tagtaaaacttaagtcaat

SEQ ID NO: 3037 - RNA, 19 nt, synthetic construct
  source 1..19: mol_type = other RNA
agtaaaacttaagtcaatc

SEQ ID NO: 3038 - RNA, 19 nt, synthetic construct
  source 1..19: mol_type = other RNA
gtaaaacttaagtcaatca

SEQ ID NO: 3039 - RNA, 19 nt, synthetic construct
  source 1..19: mol_type = other RNA
taaaacttaagtcaatcaa

SEQ ID NO: 3040 - RNA, 19 nt, synthetic construct
  source 1..19: mol_type = other RNA
aaaacttaagtcaatcaat

SEQ ID NO: 3041 - RNA, 19 nt, synthetic construct
  source 1..19: mol_type = other RNA
aaacttaagtcaatcaatc

SEQ ID NO: 3042 - RNA, 19 nt, synthetic construct
  source 1..19: mol_type = other RNA
aacttaagtcaatcaatcc

SEQ ID NO: 3043 - RNA, 19 nt, synthetic construct
  source 1..19: mol_type = other RNA
acttaagtcaatcaatcca

SEQ ID NO: 3044 - RNA, 19 nt, synthetic construct
  source 1..19: mol_type = other RNA
cttaagtcaatcaatccac

SEQ ID NO: 3045 - RNA, 19 nt, synthetic construct
  source 1..19: mol_type = other RNA
ttaagtcaatcaatccacc

SEQ ID NO: 3046 - RNA, 19 nt, synthetic construct
  source 1..19: mol_type = other RNA
taagtcaatcaatccacct

SEQ ID NO: 3047 - RNA, 19 nt, synthetic construct
  source 1..19: mol_type = other RNA
aagtcaatcaatccacctt

SEQ ID NO: 3048 - RNA, 19 nt, synthetic construct
  source 1..19: mol_type = other RNA
agtcaatcaatccaccttg

SEQ ID NO: 3049 - RNA, 19 nt, synthetic construct
  source 1..19: mol_type = other RNA
gtcaatcaatccaccttgt

SEQ ID NO: 3050 - RNA, 19 nt, synthetic construct
  source 1..19: mol_type = other RNA
tcaatcaatccaccttgtg

SEQ ID NO: 3051 - RNA, 19 nt, synthetic construct
  source 1..19: mol_type = other RNA
caatcaatccaccttgtgt

SEQ ID NO: 3052 - RNA, 19 nt, synthetic construct
  source 1..19: mol_type = other RNA
aatcaatccaccttgtgtg

SEQ ID NO: 3053 - RNA, 19 nt, synthetic construct
  source 1..19: mol_type = other RNA
atcaatccaccttgtgtgc

SEQ ID NO: 3054 - RNA, 19 nt, synthetic construct
  source 1..19: mol_type = other RNA
tcaatccaccttgtgtgcc

SEQ ID NO: 3055 - RNA, 19 nt, synthetic construct
  source 1..19: mol_type = other RNA
caatccaccttgtgtgcct

SEQ ID NO: 3056 - RNA, 19 nt, synthetic construct
  source 1..19: mol_type = other RNA
aatccaccttgtgtgcctt

SEQ ID NO: 3057 - RNA, 19 nt, synthetic construct
  source 1..19: mol_type = other RNA
atccaccttgtgtgccttt

SEQ ID NO: 3058 - RNA, 19 nt, synthetic construct
  source 1..19: mol_type = other RNA
tccaccttgtgtgcctttt

SEQ ID NO: 3059 - RNA, 19 nt, synthetic construct
  source 1..19: mol_type = other RNA
ccaccttgtgtgccttttt

SEQ ID NO: 3060 - RNA, 19 nt, synthetic construct
  source 1..19: mol_type = other RNA
caccttgtgtgcctttttt

SEQ ID NO: 3061 - RNA, 19 nt, synthetic construct
  source 1..19: mol_type = other RNA
accttgtgtgccttttttt

SEQ ID NO: 3062 - RNA, 19 nt, synthetic construct
  source 1..19: mol_type = other RNA
ccttgtgtgcctttttttg

SEQ ID NO: 3063 - RNA, 19 nt, synthetic construct
  source 1..19: mol_type = other RNA
cttgtgtgcctttttttgg

SEQ ID NO: 3064 - RNA, 19 nt, synthetic construct
  source 1..19: mol_type = other RNA
ttgtgtgcctttttttgga

SEQ ID NO: 3065 - RNA, 19 nt, synthetic construct
  source 1..19: mol_type = other RNA
tgtgtgcctttttttggaa

SEQ ID NO: 3066 - RNA, 19 nt, synthetic construct
  source 1..19: mol_type = other RNA
gtgtgcctttttttggaat

SEQ ID NO: 3067 - RNA, 19 nt, synthetic construct
  source 1..19: mol_type = other RNA
tgtgcctttttttggaata

SEQ ID NO: 3068 - RNA, 19 nt, synthetic construct
  source 1..19: mol_type = other RNA
gtgcctttttttggaatat

SEQ ID NO: 3069 - RNA, 19 nt, synthetic construct
  source 1..19: mol_type = other RNA
tgcctttttttggaatata

SEQ ID NO: 3070 - RNA, 19 nt, synthetic construct
  source 1..19: mol_type = other RNA
gcctttttttggaatatat

SEQ ID NO: 3071 - RNA, 19 nt, synthetic construct
  source 1..19: mol_type = other RNA
cctttttttggaatatatt

SEQ ID NO: 3072 - RNA, 19 nt, synthetic construct
  source 1..19: mol_type = other RNA
ctttttttggaatatattt

SEQ ID NO: 3073 - RNA, 19 nt, synthetic construct
  source 1..19: mol_type = other RNA
tttttttggaatatattta

SEQ ID NO: 3074 - RNA, 19 nt, synthetic construct
  source 1..19: mol_type = other RNA
ttttttggaatatatttaa

SEQ ID NO: 3075 - RNA, 19 nt, synthetic construct
  source 1..19: mol_type = other RNA
tttttggaatatatttaac

SEQ ID NO: 3076 - RNA, 19 nt, synthetic construct
  source 1..19: mol_type = other RNA
ttttggaatatatttaaca

SEQ ID NO: 3077 - RNA, 19 nt, synthetic construct
  source 1..19: mol_type = other RNA
tttggaatatatttaacaa

SEQ ID NO: 3078 - RNA, 19 nt, synthetic construct
  source 1..19: mol_type = other RNA
ttggaatatatttaacaaa

SEQ ID NO: 3079 - RNA, 19 nt, synthetic construct
  source 1..19: mol_type = other RNA
tggaatatatttaacaaat

SEQ ID NO: 3080 - RNA, 19 nt, synthetic construct
  source 1..19: mol_type = other RNA
ggaatatatttaacaaata

SEQ ID NO: 3081 - RNA, 19 nt, synthetic construct
  source 1..19: mol_type = other RNA
gaatatatttaacaaatat

SEQ ID NO: 3082 - RNA, 19 nt, synthetic construct
  source 1..19: mol_type = other RNA
aatatatttaacaaatatt

SEQ ID NO: 3083 - RNA, 19 nt, synthetic construct
  source 1..19: mol_type = other RNA
atatatttaacaaatattc

SEQ ID NO: 3084 - RNA, 19 nt, synthetic construct
  source 1..19: mol_type = other RNA
tatatttaacaaatattct

SEQ ID NO: 3085 - RNA, 19 nt, synthetic construct
  source 1..19: mol_type = other RNA
atatttaacaaatattctg

SEQ ID NO: 3086 - RNA, 19 nt, synthetic construct
  source 1..19: mol_type = other RNA
tatttaacaaatattctga

SEQ ID NO: 3087 - RNA, 19 nt, synthetic construct
  source 1..19: mol_type = other RNA
atttaacaaatattctgaa

SEQ ID NO: 3088 - RNA, 19 nt, synthetic construct
  source 1..19: mol_type = other RNA
tttaacaaatattctgaag

SEQ ID NO: 3089 - RNA, 19 nt, synthetic construct
  source 1..19: mol_type = other RNA
ttaacaaatattctgaaga

SEQ ID NO: 3090 - RNA, 19 nt, synthetic construct
  source 1..19: mol_type = other RNA
taacaaatattctgaagac

SEQ ID NO: 3091 - RNA, 19 nt, synthetic construct
  source 1..19: mol_type = other RNA
aacaaatattctgaagacc

SEQ ID NO: 3092 - RNA, 19 nt, synthetic construct
  source 1..19: mol_type = other RNA
acaaatattctgaagaccg

SEQ ID NO: 3093 - RNA, 19 nt, synthetic construct
  source 1..19: mol_type = other RNA
caaatattctgaagaccga

SEQ ID NO: 3094 - RNA, 19 nt, synthetic construct
  source 1..19: mol_type = other RNA
aaatattctgaagaccgaa

SEQ ID NO: 3095 - RNA, 19 nt, synthetic construct
  source 1..19: mol_type = other RNA
aatattctgaagaccgaag

SEQ ID NO: 3096 - RNA, 19 nt, synthetic construct
  source 1..19: mol_type = other RNA
atattctgaagaccgaaga

SEQ ID NO: 3097 - RNA, 19 nt, synthetic construct
  source 1..19: mol_type = other RNA
tattctgaagaccgaagaa

SEQ ID NO: 3098 - RNA, 19 nt, synthetic construct
  source 1..19: mol_type = other RNA
attctgaagaccgaagaag

SEQ ID NO: 3099 - RNA, 19 nt, synthetic construct
  source 1..19: mol_type = other RNA
ttctgaagaccgaagaagg

SEQ ID NO: 3100 - RNA, 19 nt, synthetic construct
  source 1..19: mol_type = other RNA
tctgaagaccgaagaaggg

SEQ ID NO: 3101 - RNA, 19 nt, synthetic construct
  source 1..19: mol_type = other RNA
ctgaagaccgaagaaggga

SEQ ID NO: 3102 - RNA, 19 nt, synthetic construct
  source 1..19: mol_type = other RNA
tgaagaccgaagaagggaa

SEQ ID NO: 3103 - RNA, 19 nt, synthetic construct
  source 1..19: mol_type = other RNA
gaagaccgaagaagggaat

SEQ ID NO: 3104 - RNA, 19 nt, synthetic construct
  source 1..19: mol_type = other RNA
aagaccgaagaagggaata

SEQ ID NO: 3105 - RNA, 19 nt, synthetic construct
  source 1..19: mol_type = other RNA
agaccgaagaagggaataa

SEQ ID NO: 3106 - RNA, 19 nt, synthetic construct
  source 1..19: mol_type = other RNA
gaccgaagaagggaataat

SEQ ID NO: 3107 - RNA, 19 nt, synthetic construct
  source 1..19: mol_type = other RNA
accgaagaagggaataatg

SEQ ID NO: 3108 - RNA, 19 nt, synthetic construct
  source 1..19: mol_type = other RNA
ccgaagaagggaataatga

SEQ ID NO: 3109 - RNA, 19 nt, synthetic construct
  source 1..19: mol_type = other RNA
cgaagaagggaataatgat

SEQ ID NO: 3110 - RNA, 19 nt, synthetic construct
  source 1..19: mol_type = other RNA
gaagaagggaataatgatt

SEQ ID NO: 3111 - RNA, 19 nt, synthetic construct
  source 1..19: mol_type = other RNA
aagaagggaataatgattt

SEQ ID NO: 3112 - RNA, 19 nt, synthetic construct
  source 1..19: mol_type = other RNA
agaagggaataatgatttt

SEQ ID NO: 3113 - RNA, 19 nt, synthetic construct
  source 1..19: mol_type = other RNA
gaagggaataatgattttt

SEQ ID NO: 3114 - RNA, 19 nt, synthetic construct
  source 1..19: mol_type = other RNA
aagggaataatgatttttt

SEQ ID NO: 3115 - RNA, 19 nt, synthetic construct
  source 1..19: mol_type = other RNA
agggaataatgatttttta

SEQ ID NO: 3116 - RNA, 19 nt, synthetic construct
  source 1..19: mol_type = other RNA
gggaataatgattttttaa

SEQ ID NO: 3117 - RNA, 19 nt, synthetic construct
  source 1..19: mol_type = other RNA
ggaataatgattttttaaa

SEQ ID NO: 3118 - RNA, 19 nt, synthetic construct
  source 1..19: mol_type = other RNA
gaataatgattttttaaaa

SEQ ID NO: 3119 - RNA, 19 nt, synthetic construct
  source 1..19: mol_type = other RNA
aataatgattttttaaaaa

SEQ ID NO: 3120 - RNA, 19 nt, synthetic construct
  source 1..19: mol_type = other RNA
ataatgattttttaaaaaa

SEQ ID NO: 3121 - RNA, 19 nt, synthetic construct
  source 1..19: mol_type = other RNA
taatgattttttaaaaaag

SEQ ID NO: 3122 - RNA, 19 nt, synthetic construct
  source 1..19: mol_type = other RNA
aatgattttttaaaaaaga

SEQ ID NO: 3123 - RNA, 19 nt, synthetic construct
  source 1..19: mol_type = other RNA
atgattttttaaaaaagaa

SEQ ID NO: 3124 - RNA, 19 nt, synthetic construct
  source 1..19: mol_type = other RNA
tgattttttaaaaaagaaa

SEQ ID NO: 3125 - RNA, 19 nt, synthetic construct
  source 1..19: mol_type = other RNA
gattttttaaaaaagaaag

SEQ ID NO: 3126 - RNA, 19 nt, synthetic construct
  source 1..19: mol_type = other RNA
attttttaaaaaagaaagg

SEQ ID NO: 3127 - RNA, 19 nt, synthetic construct
  source 1..19: mol_type = other RNA
ttttttaaaaaagaaaggg

SEQ ID NO: 3128 - RNA, 19 nt, synthetic construct
  source 1..19: mol_type = other RNA
tttttaaaaaagaaaggga

SEQ ID NO: 3129 - RNA, 19 nt, synthetic construct
  source 1..19: mol_type = other RNA
ttttaaaaaagaaagggaa

SEQ ID NO: 3130 - RNA, 19 nt, synthetic construct
  source 1..19: mol_type = other RNA
tttaaaaaagaaagggaaa

SEQ ID NO: 3131 - RNA, 19 nt, synthetic construct
  source 1..19: mol_type = other RNA
ttaaaaaagaaagggaaag

SEQ ID NO: 3132 - RNA, 19 nt, synthetic construct
  source 1..19: mol_type = other RNA
taaaaaagaaagggaaaga

SEQ ID NO: 3133 - RNA, 19 nt, synthetic construct
  source 1..19: mol_type = other RNA
aaaaaagaaagggaaagat

SEQ ID NO: 3134 - RNA, 19 nt, synthetic construct
  source 1..19: mol_type = other RNA
aaaaagaaagggaaagatt

SEQ ID NO: 3135 - RNA, 19 nt, synthetic construct
  source 1..19: mol_type = other RNA
aaaagaaagggaaagattt

SEQ ID NO: 3136 - RNA, 19 nt, synthetic construct
  source 1..19: mol_type = other RNA
aaagaaagggaaagattta

SEQ ID NO: 3137 - RNA, 19 nt, synthetic construct
  source 1..19: mol_type = other RNA
aagaaagggaaagatttaa

SEQ ID NO: 3138 - RNA, 19 nt, synthetic construct
  source 1..19: mol_type = other RNA
agaaagggaaagatttaat

SEQ ID NO: 3139 - RNA, 19 nt, synthetic construct
  source 1..19: mol_type = other RNA
gaaagggaaagatttaatc

SEQ ID NO: 3140 - RNA, 19 nt, synthetic construct
  source 1..19: mol_type = other RNA
aaagggaaagatttaatca

SEQ ID NO: 3141 - RNA, 19 nt, synthetic construct
  source 1..19: mol_type = other RNA
aagggaaagatttaatcaa

SEQ ID NO: 3142 - RNA, 19 nt, synthetic construct
  source 1..19: mol_type = other RNA
agggaaagatttaatcaat

SEQ ID NO: 3143 - RNA, 19 nt, synthetic construct
  source 1..19: mol_type = other RNA
gggaaagatttaatcaatt

SEQ ID NO: 3144 - RNA, 19 nt, synthetic construct
  source 1..19: mol_type = other RNA
ggaaagatttaatcaattt

SEQ ID NO: 3145 - RNA, 19 nt, synthetic construct
  source 1..19: mol_type = other RNA
gaaagatttaatcaatttc

SEQ ID NO: 3146 - RNA, 19 nt, synthetic construct
  source 1..19: mol_type = other RNA
aaagatttaatcaatttca

SEQ ID NO: 3147 - RNA, 19 nt, synthetic construct
  source 1..19: mol_type = other RNA
aagatttaatcaatttcag

SEQ ID NO: 3148 - RNA, 19 nt, synthetic construct
  source 1..19: mol_type = other RNA
agatttaatcaatttcagt

SEQ ID NO: 3149 - RNA, 19 nt, synthetic construct
  source 1..19: mol_type = other RNA
gatttaatcaatttcagta

SEQ ID NO: 3150 - RNA, 19 nt, synthetic construct
  source 1..19: mol_type = other RNA
atttaatcaatttcagtaa

SEQ ID NO: 3151 - RNA, 19 nt, synthetic construct
  source 1..19: mol_type = other RNA
tttaatcaatttcagtaag

SEQ ID NO: 3152 - RNA, 19 nt, synthetic construct
  source 1..19: mol_type = other RNA
ttaatcaatttcagtaaga

SEQ ID NO: 3153 - RNA, 19 nt, synthetic construct
  source 1..19: mol_type = other RNA
taatcaatttcagtaagag

SEQ ID NO: 3154 - RNA, 19 nt, synthetic construct
  source 1..19: mol_type = other RNA
aatcaatttcagtaagagg

SEQ ID NO: 3155 - RNA, 19 nt, synthetic construct
  source 1..19: mol_type = other RNA
atcaatttcagtaagagga

SEQ ID NO: 3156 - RNA, 19 nt, synthetic construct
  source 1..19: mol_type = other RNA
tcaatttcagtaagaggag

SEQ ID NO: 3157 - RNA, 19 nt, synthetic construct
  source 1..19: mol_type = other RNA
caatttcagtaagaggagg

SEQ ID NO: 3158 - RNA, 19 nt, synthetic construct
  source 1..19: mol_type = other RNA
aatttcagtaagaggagga

SEQ ID NO: 3159 - RNA, 19 nt, synthetic construct
  source 1..19: mol_type = other RNA
atttcagtaagaggaggaa

SEQ ID NO: 3160 - RNA, 19 nt, synthetic construct
  source 1..19: mol_type = other RNA
tttcagtaagaggaggaaa

SEQ ID NO: 3161 - RNA, 19 nt, synthetic construct
  source 1..19: mol_type = other RNA
ttcagtaagaggaggaaag

SEQ ID NO: 3162 - RNA, 19 nt, synthetic construct
  source 1..19: mol_type = other RNA
tcagtaagaggaggaaagt

SEQ ID NO: 3163 - RNA, 19 nt, synthetic construct
  source 1..19: mol_type = other RNA
cagtaagaggaggaaagta

SEQ ID NO: 3164 - RNA, 19 nt, synthetic construct
  source 1..19: mol_type = other RNA
agtaagaggaggaaagtag

SEQ ID NO: 3165 - RNA, 19 nt, synthetic construct
  source 1..19: mol_type = other RNA
gtaagaggaggaaagtagc

SEQ ID NO: 3166 - RNA, 19 nt, synthetic construct
  source 1..19: mol_type = other RNA
taagaggaggaaagtagct

SEQ ID NO: 3167 - RNA, 19 nt, synthetic construct
  source 1..19: mol_type = other RNA
aagaggaggaaagtagctg

SEQ ID NO: 3168 - RNA, 19 nt, synthetic construct
  source 1..19: mol_type = other RNA
agaggaggaaagtagctga

SEQ ID NO: 3169 - RNA, 19 nt, synthetic construct
  source 1..19: mol_type = other RNA
gaggaggaaagtagctgaa

SEQ ID NO: 3170 - RNA, 19 nt, synthetic construct
  source 1..19: mol_type = other RNA
aggaggaaagtagctgaaa

SEQ ID NO: 3171 - RNA, 19 nt, synthetic construct
  source 1..19: mol_type = other RNA
ggaggaaagtagctgaaat

SEQ ID NO: 3172 - RNA, 19 nt, synthetic construct
  source 1..19: mol_type = other RNA
gaggaaagtagctgaaatt

SEQ ID NO: 3173 - RNA, 19 nt, synthetic construct
  source 1..19: mol_type = other RNA
aggaaagtagctgaaatta

SEQ ID NO: 3174 - RNA, 19 nt, synthetic construct
  source 1..19: mol_type = other RNA
ggaaagtagctgaaattac

SEQ ID NO: 3175 - RNA, 19 nt, synthetic construct
  source 1..19: mol_type = other RNA
gaaagtagctgaaattact

SEQ ID NO: 3176 - RNA, 19 nt, synthetic construct
  source 1..19: mol_type = other RNA
aaagtagctgaaattactg

SEQ ID NO: 3177 - RNA, 19 nt, synthetic construct
  source 1..19: mol_type = other RNA
aagtagctgaaattactgg

SEQ ID NO: 3178 - RNA, 19 nt, synthetic construct
  source 1..19: mol_type = other RNA
agtagctgaaattactgga

SEQ ID NO: 3179 - RNA, 19 nt, synthetic construct
  source 1..19: mol_type = other RNA
gtagctgaaattactggag

SEQ ID NO: 3180 - RNA, 19 nt, synthetic construct
  source 1..19: mol_type = other RNA
tagctgaaattactggaga

SEQ ID NO: 3181 - RNA, 19 nt, synthetic construct
  source 1..19: mol_type = other RNA
agctgaaattactggagaa

SEQ ID NO: 3182 - RNA, 19 nt, synthetic construct
  source 1..19: mol_type = other RNA
gctgaaattactggagaaa

SEQ ID NO: 3183 - RNA, 19 nt, synthetic construct
  source 1..19: mol_type = other RNA
ctgaaattactggagaaat

SEQ ID NO: 3184 - RNA, 19 nt, synthetic construct
  source 1..19: mol_type = other RNA
tgaaattactggagaaatt

SEQ ID NO: 3185 - RNA, 19 nt, synthetic construct
  source 1..19: mol_type = other RNA
gaaattactggagaaattc

SEQ ID NO: 3186 - RNA, 19 nt, synthetic construct
  source 1..19: mol_type = other RNA
aaattactggagaaattca

SEQ ID NO: 3187 - RNA, 19 nt, synthetic construct
  source 1..19: mol_type = other RNA
aattactggagaaattcag

SEQ ID NO: 3188 - RNA, 19 nt, synthetic construct
  source 1..19: mol_type = other RNA
attactggagaaattcagc

SEQ ID NO: 3189 - RNA, 19 nt, synthetic construct
  source 1..19: mol_type = other RNA
ttactggagaaattcagca

SEQ ID NO: 3190 - RNA, 19 nt, synthetic construct
  source 1..19: mol_type = other RNA
tactggagaaattcagcag

SEQ ID NO: 3191 - RNA, 19 nt, synthetic construct
  source 1..19: mol_type = other RNA
actggagaaattcagcagt

SEQ ID NO: 3192 - RNA, 19 nt, synthetic construct
  source 1..19: mol_type = other RNA
ctggagaaattcagcagta

SEQ ID NO: 3193 - RNA, 19 nt, synthetic construct
  source 1..19: mol_type = other RNA
tggagaaattcagcagtat

SEQ ID NO: 3194 - RNA, 19 nt, synthetic construct
  source 1..19: mol_type = other RNA
ggagaaattcagcagtatc

SEQ ID NO: 3195 - RNA, 19 nt, synthetic construct
  source 1..19: mol_type = other RNA
gagaaattcagcagtatca

SEQ ID NO: 3196 - RNA, 19 nt, synthetic construct
  source 1..19: mol_type = other RNA
agaaattcagcagtatcag

SEQ ID NO: 3197 - RNA, 19 nt, synthetic construct
  source 1..19: mol_type = other RNA
gaaattcagcagtatcaga

SEQ ID NO: 3198 - RNA, 19 nt, synthetic construct
  source 1..19: mol_type = other RNA
aaattcagcagtatcagaa

SEQ ID NO: 3199 - RNA, 19 nt, synthetic construct
  source 1..19: mol_type = other RNA
aattcagcagtatcagaat

SEQ ID NO: 3200 - RNA, 19 nt, synthetic construct
  source 1..19: mol_type = other RNA
attcagcagtatcagaatc

SEQ ID NO: 3201 - RNA, 19 nt, synthetic construct
  source 1..19: mol_type = other RNA
ttcagcagtatcagaatca

SEQ ID NO: 3202 - RNA, 19 nt, synthetic construct
  source 1..19: mol_type = other RNA
tcagcagtatcagaatcag

SEQ ID NO: 3203 - RNA, 19 nt, synthetic construct
  source 1..19: mol_type = other RNA
cagcagtatcagaatcagc

SEQ ID NO: 3204 - RNA, 19 nt, synthetic construct
  source 1..19: mol_type = other RNA
agcagtatcagaatcagcc

SEQ ID NO: 3205 - RNA, 19 nt, synthetic construct
  source 1..19: mol_type = other RNA
gcagtatcagaatcagcct

SEQ ID NO: 3206 - RNA, 19 nt, synthetic construct
  source 1..19: mol_type = other RNA
cagtatcagaatcagcctt

SEQ ID NO: 3207 - RNA, 19 nt, synthetic construct
  source 1..19: mol_type = other RNA
agtatcagaatcagcctta

SEQ ID NO: 3208 - RNA, 19 nt, synthetic construct
  source 1..19: mol_type = other RNA
gtatcagaatcagccttac

SEQ ID NO: 3209 - RNA, 19 nt, synthetic construct
  source 1..19: mol_type = other RNA
tatcagaatcagccttact

SEQ ID NO: 3210 - RNA, 19 nt, synthetic construct
  source 1..19: mol_type = other RNA
atcagaatcagccttactg

SEQ ID NO: 3211 - RNA, 19 nt, synthetic construct
  source 1..19: mol_type = other RNA
tcagaatcagccttactgt

SEQ ID NO: 3212 - RNA, 19 nt, synthetic construct
  source 1..19: mol_type = other RNA
cagaatcagccttactgtt

SEQ ID NO: 3213 - RNA, 19 nt, synthetic construct
  source 1..19: mol_type = other RNA
agaatcagccttactgttt

SEQ ID NO: 3214 - RNA, 19 nt, synthetic construct
  source 1..19: mol_type = other RNA
gaatcagccttactgttta

SEQ ID NO: 3215 - RNA, 19 nt, synthetic construct
  source 1..19: mol_type = other RNA
aatcagccttactgtttac

SEQ ID NO: 3216 - RNA, 19 nt, synthetic construct
  source 1..19: mol_type = other RNA
atcagccttactgtttacg

SEQ ID NO: 3217 - RNA, 19 nt, synthetic construct
  source 1..19: mol_type = other RNA
tcagccttactgtttacgg

SEQ ID NO: 3218 - RNA, 19 nt, synthetic construct
  source 1..19: mol_type = other RNA
cagccttactgtttacgga

SEQ ID NO: 3219 - RNA, 19 nt, synthetic construct
  source 1..19: mol_type = other RNA
agccttactgtttacggat

SEQ ID NO: 3220 - RNA, 19 nt, synthetic construct
  source 1..19: mol_type = other RNA
gccttactgtttacggata

SEQ ID NO: 3221 - RNA, 19 nt, synthetic construct
  source 1..19: mol_type = other RNA
ccttactgtttacggatag

SEQ ID NO: 3222 - RNA, 19 nt, synthetic construct
  source 1..19: mol_type = other RNA
cttactgtttacggataga

SEQ ID NO: 3223 - RNA, 19 nt, synthetic construct
  source 1..19: mol_type = other RNA
ttactgtttacggatagaa

SEQ ID NO: 3224 - RNA, 19 nt, synthetic construct
  source 1..19: mol_type = other RNA
tactgtttacggatagaac

SEQ ID NO: 3225 - RNA, 19 nt, synthetic construct
  source 1..19: mol_type = other RNA
actgtttacggatagaacc

SEQ ID NO: 3226 - RNA, 19 nt, synthetic construct
  source 1..19: mol_type = other RNA
ctgtttacggatagaacca

SEQ ID NO: 3227 - RNA, 19 nt, synthetic construct
  source 1..19: mol_type = other RNA
tgtttacggatagaaccag

SEQ ID NO: 3228 - RNA, 19 nt, synthetic construct
  source 1..19: mol_type = other RNA
gtttacggatagaaccaga

SEQ ID NO: 3229 - RNA, 19 nt, synthetic construct
  source 1..19: mol_type = other RNA
tttacggatagaaccagat

SEQ ID NO: 3230 - RNA, 19 nt, synthetic construct
  source 1..19: mol_type = other RNA
ttacggatagaaccagata

SEQ ID NO: 3231 - RNA, 19 nt, synthetic construct
  source 1..19: mol_type = other RNA
tacggatagaaccagatat

SEQ ID NO: 3232 - RNA, 19 nt, synthetic construct
  source 1..19: mol_type = other RNA
acggatagaaccagatatg

SEQ ID NO: 3233 - RNA, 19 nt, synthetic construct
  source 1..19: mol_type = other RNA
cggatagaaccagatatga

SEQ ID NO: 3234 - RNA, 19 nt, synthetic construct
  source 1..19: mol_type = other RNA
ggatagaaccagatatgag

SEQ ID NO: 3235 - RNA, 19 nt, synthetic construct
  source 1..19: mol_type = other RNA
gatagaaccagatatgagg

SEQ ID NO: 3236 - RNA, 19 nt, synthetic construct
  source 1..19: mol_type = other RNA
atagaaccagatatgagga

SEQ ID NO: 3237 - RNA, 19 nt, synthetic construct
  source 1..19: mol_type = other RNA
tagaaccagatatgaggag

SEQ ID NO: 3238 - RNA, 19 nt, synthetic construct
  source 1..19: mol_type = other RNA
agaaccagatatgaggaga

SEQ ID NO: 3239 - RNA, 19 nt, synthetic construct
  source 1..19: mol_type = other RNA
gaaccagatatgaggagat

SEQ ID NO: 3240 - RNA, 19 nt, synthetic construct
  source 1..19: mol_type = other RNA
aaccagatatgaggagatt

SEQ ID NO: 3241 - RNA, 19 nt, synthetic construct
  source 1..19: mol_type = other RNA
accagatatgaggagattc

SEQ ID NO: 3242 - RNA, 19 nt, synthetic construct
  source 1..19: mol_type = other RNA
ccagatatgaggagattct

SEQ ID NO: 3243 - RNA, 19 nt, synthetic construct
  source 1..19: mol_type = other RNA
cagatatgaggagattctt

SEQ ID NO: 3244 - RNA, 19 nt, synthetic construct
  source 1..19: mol_type = other RNA
agatatgaggagattcttt

SEQ ID NO: 3245 - RNA, 19 nt, synthetic construct
  source 1..19: mol_type = other RNA
gatatgaggagattctttg

SEQ ID NO: 3246 - RNA, 19 nt, synthetic construct
  source 1..19: mol_type = other RNA
atatgaggagattctttga

SEQ ID NO: 3247 - RNA, 19 nt, synthetic construct
  source 1..19: mol_type = other RNA
tatgaggagattctttgaa

SEQ ID NO: 3248 - RNA, 19 nt, synthetic construct
  source 1..19: mol_type = other RNA
atgaggagattctttgaaa

SEQ ID NO: 3249 - RNA, 19 nt, synthetic construct
  source 1..19: mol_type = other RNA
tgaggagattctttgaaaa

SEQ ID NO: 3250 - RNA, 19 nt, synthetic construct
  source 1..19: mol_type = other RNA
gaggagattctttgaaaac

SEQ ID NO: 3251 - RNA, 19 nt, synthetic construct
  source 1..19: mol_type = other RNA
aggagattctttgaaaacc

SEQ ID NO: 3252 - RNA, 19 nt, synthetic construct
  source 1..19: mol_type = other RNA
ggagattctttgaaaacct

SEQ ID NO: 3253 - RNA, 19 nt, synthetic construct
  source 1..19: mol_type = other RNA
gagattctttgaaaacctt

SEQ ID NO: 3254 - RNA, 19 nt, synthetic construct
  source 1..19: mol_type = other RNA
agattctttgaaaacctta

SEQ ID NO: 3255 - RNA, 19 nt, synthetic construct
  source 1..19: mol_type = other RNA
gattctttgaaaaccttaa

SEQ ID NO: 3256 - RNA, 19 nt, synthetic construct
  source 1..19: mol_type = other RNA
attctttgaaaaccttaac

SEQ ID NO: 3257 - RNA, 19 nt, synthetic construct
  source 1..19: mol_type = other RNA
ttctttgaaaaccttaacc

SEQ ID NO: 3258 - RNA, 19 nt, synthetic construct
  source 1..19: mol_type = other RNA
tctttgaaaaccttaaccc

SEQ ID NO: 3259 - RNA, 19 nt, synthetic construct
  source 1..19: mol_type = other RNA
ctttgaaaaccttaacccc

SEQ ID NO: 3260 - RNA, 19 nt, synthetic construct
  source 1..19: mol_type = other RNA
tttgaaaaccttaacccca

SEQ ID NO: 3261 - RNA, 19 nt, synthetic construct
  source 1..19: mol_type = other RNA
ttgaaaaccttaaccccat

SEQ ID NO: 3262 - RNA, 19 nt, synthetic construct
  source 1..19: mol_type = other RNA
tgaaaaccttaaccccatg

SEQ ID NO: 3263 - RNA, 19 nt, synthetic construct
  source 1..19: mol_type = other RNA
gaaaaccttaaccccatgg

SEQ ID NO: 3264 - RNA, 19 nt, synthetic construct
  source 1..19: mol_type = other RNA
aaaaccttaaccccatggg

SEQ ID NO: 3265 - RNA, 19 nt, synthetic construct
  source 1..19: mol_type = other RNA
aaaccttaaccccatggga

SEQ ID NO: 3266 - RNA, 19 nt, synthetic construct
  source 1..19: mol_type = other RNA
aaccttaaccccatgggaa

SEQ ID NO: 3267 - RNA, 19 nt, synthetic construct
  source 1..19: mol_type = other RNA
accttaaccccatgggaag

SEQ ID NO: 3268 - RNA, 19 nt, synthetic construct
  source 1..19: mol_type = other RNA
ccttaaccccatgggaagt

SEQ ID NO: 3269 - RNA, 19 nt, synthetic construct
  source 1..19: mol_type = other RNA
cttaaccccatgggaagtg

SEQ ID NO: 3270 - RNA, 19 nt, synthetic construct
  source 1..19: mol_type = other RNA
ttaaccccatgggaagtgc

SEQ ID NO: 3271 - RNA, 19 nt, synthetic construct
  source 1..19: mol_type = other RNA
taaccccatgggaagtgca

SEQ ID NO: 3272 - RNA, 19 nt, synthetic construct
  source 1..19: mol_type = other RNA
aaccccatgggaagtgcat

SEQ ID NO: 3273 - RNA, 19 nt, synthetic construct
  source 1..19: mol_type = other RNA
accccatgggaagtgcatc

SEQ ID NO: 3274 - RNA, 19 nt, synthetic construct
  source 1..19: mol_type = other RNA
ccccatgggaagtgcatct

SEQ ID NO: 3275 - RNA, 19 nt, synthetic construct
  source 1..19: mol_type = other RNA
cccatgggaagtgcatctg

SEQ ID NO: 3276 - RNA, 19 nt, synthetic construct
  source 1..19: mol_type = other RNA
ccatgggaagtgcatctga

SEQ ID NO: 3277 - RNA, 19 nt, synthetic construct
  source 1..19: mol_type = other RNA
catgggaagtgcatctgaa

SEQ ID NO: 3278 - RNA, 19 nt, synthetic construct
  source 1..19: mol_type = other RNA
atgggaagtgcatctgaaa

SEQ ID NO: 3279 - RNA, 19 nt, synthetic construct
  source 1..19: mol_type = other RNA
tgggaagtgcatctgaaaa

SEQ ID NO: 3280 - RNA, 19 nt, synthetic construct
  source 1..19: mol_type = other RNA
gggaagtgcatctgaaaaa

SEQ ID NO: 3281 - RNA, 19 nt, synthetic construct
  source 1..19: mol_type = other RNA
ggaagtgcatctgaaaaag

SEQ ID NO: 3282 - RNA, 19 nt, synthetic construct
  source 1..19: mol_type = other RNA
gaagtgcatctgaaaaaga

SEQ ID NO: 3283 - RNA, 19 nt, synthetic construct
  source 1..19: mol_type = other RNA
aagtgcatctgaaaaagag

SEQ ID NO: 3284 - RNA, 19 nt, synthetic construct
  source 1..19: mol_type = other RNA
agtgcatctgaaaaagagt

SEQ ID NO: 3285 - RNA, 19 nt, synthetic construct
  source 1..19: mol_type = other RNA
gtgcatctgaaaaagagtt

SEQ ID NO: 3286 - RNA, 19 nt, synthetic construct
  source 1..19: mol_type = other RNA
tgcatctgaaaaagagttt

SEQ ID NO: 3287 - RNA, 19 nt, synthetic construct
  source 1..19: mol_type = other RNA
gcatctgaaaaagagttta

SEQ ID NO: 3288 - RNA, 19 nt, synthetic construct
  source 1..19: mol_type = other RNA
catctgaaaaagagtttac

SEQ ID NO: 3289 - RNA, 19 nt, synthetic construct
  source 1..19: mol_type = other RNA
atctgaaaaagagtttaca

SEQ ID NO: 3290 - RNA, 19 nt, synthetic construct
  source 1..19: mol_type = other RNA
tctgaaaaagagtttacag

SEQ ID NO: 3291 - RNA, 19 nt, synthetic construct
  source 1..19: mol_type = other RNA
ctgaaaaagagtttacaga

SEQ ID NO: 3292 - RNA, 19 nt, synthetic construct
  source 1..19: mol_type = other RNA
tgaaaaagagtttacagat

SEQ ID NO: 3293 - RNA, 19 nt, synthetic construct
  source 1..19: mol_type = other RNA
gaaaaagagtttacagatt

SEQ ID NO: 3294 - RNA, 19 nt, synthetic construct
  source 1..19: mol_type = other RNA
aaaaagagtttacagatta

SEQ ID NO: 3295 - RNA, 19 nt, synthetic construct
  source 1..19: mol_type = other RNA
aaaagagtttacagattat

SEQ ID NO: 3296 - RNA, 19 nt, synthetic construct
  source 1..19: mol_type = other RNA
aaagagtttacagattatt

SEQ ID NO: 3297 - RNA, 19 nt, synthetic construct
  source 1..19: mol_type = other RNA
aagagtttacagattattt

SEQ ID NO: 3298 - RNA, 19 nt, synthetic construct
  source 1..19: mol_type = other RNA
agagtttacagattatttg

SEQ ID NO: 3299 - RNA, 19 nt, synthetic construct
  source 1..19: mol_type = other RNA
gagtttacagattatttgt

SEQ ID NO: 3300 - RNA, 19 nt, synthetic construct
  source 1..19: mol_type = other RNA
agtttacagattatttgtt

SEQ ID NO: 3301 - RNA, 19 nt, synthetic construct
  source 1..19: mol_type = other RNA
gtttacagattatttgttc

SEQ ID NO: 3302 - RNA, 19 nt, synthetic construct
  source 1..19: mol_type = other RNA
tttacagattatttgttca

SEQ ID NO: 3303 - RNA, 19 nt, synthetic construct
  source 1..19: mol_type = other RNA
ttacagattatttgttcaa

SEQ ID NO: 3304 - RNA, 19 nt, synthetic construct
  source 1..19: mol_type = other RNA
tacagattatttgttcaac

SEQ ID NO: 3305 - RNA, 19 nt, synthetic construct
  source 1..19: mol_type = other RNA
acagattatttgttcaaca

SEQ ID NO: 3306 - RNA, 19 nt, synthetic construct
  source 1..19: mol_type = other RNA
cagattatttgttcaacaa

SEQ ID NO: 3307 - RNA, 19 nt, synthetic construct
  source 1..19: mol_type = other RNA
agattatttgttcaacaag

SEQ ID NO: 3308 - RNA, 19 nt, synthetic construct
  source 1..19: mol_type = other RNA
gattatttgttcaacaagt

SEQ ID NO: 3309 - RNA, 19 nt, synthetic construct
  source 1..19: mol_type = other RNA
attatttgttcaacaagtc

SEQ ID NO: 3310 - RNA, 19 nt, synthetic construct
  source 1..19: mol_type = other RNA
ttatttgttcaacaagtca

SEQ ID NO: 3311 - RNA, 19 nt, synthetic construct
  source 1..19: mol_type = other RNA
tatttgttcaacaagtcac

SEQ ID NO: 3312 - RNA, 19 nt, synthetic construct
  source 1..19: mol_type = other RNA
atttgttcaacaagtcact

SEQ ID NO: 3313 - RNA, 19 nt, synthetic construct
  source 1..19: mol_type = other RNA
tttgttcaacaagtcacta

SEQ ID NO: 3314 - RNA, 19 nt, synthetic construct
  source 1..19: mol_type = other RNA
ttgttcaacaagtcactag

SEQ ID NO: 3315 - RNA, 19 nt, synthetic construct
  source 1..19: mol_type = other RNA
tgttcaacaagtcactaga

SEQ ID NO: 3316 - RNA, 19 nt, synthetic construct
  source 1..19: mol_type = other RNA
gttcaacaagtcactagaa

SEQ ID NO: 3317 - RNA, 19 nt, synthetic construct
  source 1..19: mol_type = other RNA
ttcaacaagtcactagaaa

SEQ ID NO: 3318 - RNA, 19 nt, synthetic construct
  source 1..19: mol_type = other RNA
tcaacaagtcactagaaat

SEQ ID NO: 3319 - RNA, 19 nt, synthetic construct
  source 1..19: mol_type = other RNA
caacaagtcactagaaatt

SEQ ID NO: 3320 - RNA, 19 nt, synthetic construct
  source 1..19: mol_type = other RNA
aacaagtcactagaaattg

SEQ ID NO: 3321 - RNA, 19 nt, synthetic construct
  source 1..19: mol_type = other RNA
acaagtcactagaaattga

SEQ ID NO: 3322 - RNA, 19 nt, synthetic construct
  source 1..19: mol_type = other RNA
caagtcactagaaattgaa

SEQ ID NO: 3323 - RNA, 19 nt, synthetic construct
  source 1..19: mol_type = other RNA
aagtcactagaaattgaac

SEQ ID NO: 3324 - RNA, 19 nt, synthetic construct
  source 1..19: mol_type = other RNA
agtcactagaaattgaacc

SEQ ID NO: 3325 - RNA, 19 nt, synthetic construct
  source 1..19: mol_type = other RNA
gtcactagaaattgaacct

SEQ ID NO: 3326 - RNA, 19 nt, synthetic construct
  source 1..19: mol_type = other RNA
tcactagaaattgaacctc

SEQ ID NO: 3327 - RNA, 19 nt, synthetic construct
  source 1..19: mol_type = other RNA
cactagaaattgaacctcg

SEQ ID NO: 3328 - RNA, 19 nt, synthetic construct
  source 1..19: mol_type = other RNA
actagaaattgaacctcga

SEQ ID NO: 3329 - RNA, 19 nt, synthetic construct
  source 1..19: mol_type = other RNA
ctagaaattgaacctcgaa

SEQ ID NO: 3330 - RNA, 19 nt, synthetic construct
  source 1..19: mol_type = other RNA
tagaaattgaacctcgaaa

SEQ ID NO: 3331 - RNA, 19 nt, synthetic construct
  source 1..19: mol_type = other RNA
agaaattgaacctcgaaac

SEQ ID NO: 3332 - RNA, 19 nt, synthetic construct
  source 1..19: mol_type = other RNA
gaaattgaacctcgaaact

SEQ ID NO: 3333 - RNA, 19 nt, synthetic construct
  source 1..19: mol_type = other RNA
aaattgaacctcgaaactg

SEQ ID NO: 3334 - RNA, 19 nt, synthetic construct
  source 1..19: mol_type = other RNA
aattgaacctcgaaactgc

SEQ ID NO: 3335 - RNA, 19 nt, synthetic construct
  source 1..19: mol_type = other RNA
attgaacctcgaaactgca

SEQ ID NO: 3336 - RNA, 19 nt, synthetic construct
  source 1..19: mol_type = other RNA
ttgaacctcgaaactgcaa

SEQ ID NO: 3337 - RNA, 19 nt, synthetic construct
  source 1..19: mol_type = other RNA
tgaacctcgaaactgcaaa

SEQ ID NO: 3338 - RNA, 19 nt, synthetic construct
  source 1..19: mol_type = other RNA
gaacctcgaaactgcaaac

SEQ ID NO: 3339 - RNA, 19 nt, synthetic construct
  source 1..19: mol_type = other RNA
aacctcgaaactgcaaaca

SEQ ID NO: 3340 - RNA, 19 nt, synthetic construct
  source 1..19: mol_type = other RNA
acctcgaaactgcaaacag

SEQ ID NO: 3341 - RNA, 19 nt, synthetic construct
  source 1..19: mol_type = other RNA
cctcgaaactgcaaacagc

SEQ ID NO: 3342 - RNA, 19 nt, synthetic construct
  source 1..19: mol_type = other RNA
ctcgaaactgcaaacagcc

SEQ ID NO: 3343 - RNA, 19 nt, synthetic construct
  source 1..19: mol_type = other RNA
tcgaaactgcaaacagcca

SEQ ID NO: 3344 - RNA, 19 nt, synthetic construct
  source 1..19: mol_type = other RNA
cgaaactgcaaacagccac

SEQ ID NO: 3345 - RNA, 19 nt, synthetic construct
  source 1..19: mol_type = other RNA
gaaactgcaaacagccacc

SEQ ID NO: 3346 - RNA, 19 nt, synthetic construct
  source 1..19: mol_type = other RNA
aaactgcaaacagccacct

SEQ ID NO: 3347 - RNA, 19 nt, synthetic construct
  source 1..19: mol_type = other RNA
aactgcaaacagccacctc

SEQ ID NO: 3348 - RNA, 19 nt, synthetic construct
  source 1..19: mol_type = other RNA
actgcaaacagccacctcg

SEQ ID NO: 3349 - RNA, 19 nt, synthetic construct
  source 1..19: mol_type = other RNA
ctgcaaacagccacctcga

SEQ ID NO: 3350 - RNA, 19 nt, synthetic construct
  source 1..19: mol_type = other RNA
tgcaaacagccacctcgat

SEQ ID NO: 3351 - RNA, 19 nt, synthetic construct
  source 1..19: mol_type = other RNA
gcaaacagccacctcgatt

SEQ ID NO: 3352 - RNA, 19 nt, synthetic construct
  source 1..19: mol_type = other RNA
caaacagccacctcgattt

SEQ ID NO: 3353 - RNA, 19 nt, synthetic construct
  source 1..19: mol_type = other RNA
aaacagccacctcgatttc

SEQ ID NO: 3354 - RNA, 19 nt, synthetic construct
  source 1..19: mol_type = other RNA
aacagccacctcgatttcc

SEQ ID NO: 3355 - RNA, 19 nt, synthetic construct
  source 1..19: mol_type = other RNA
acagccacctcgatttcct

SEQ ID NO: 3356 - RNA, 19 nt, synthetic construct
  source 1..19: mol_type = other RNA
cagccacctcgatttccta

SEQ ID NO: 3357 - RNA, 19 nt, synthetic construct
  source 1..19: mol_type = other RNA
agccacctcgatttcctag

SEQ ID NO: 3358 - RNA, 19 nt, synthetic construct
  source 1..19: mol_type = other RNA
gccacctcgatttcctagg

SEQ ID NO: 3359 - RNA, 19 nt, synthetic construct
  source 1..19: mol_type = other RNA
ccacctcgatttcctagga

SEQ ID NO: 3360 - RNA, 19 nt, synthetic construct
  source 1..19: mol_type = other RNA
cacctcgatttcctaggaa

SEQ ID NO: 3361 - RNA, 19 nt, synthetic construct
  source 1..19: mol_type = other RNA
acctcgatttcctaggaaa

SEQ ID NO: 3362 - RNA, 19 nt, synthetic construct
  source 1..19: mol_type = other RNA
cctcgatttcctaggaaat

SEQ ID NO: 3363 - RNA, 19 nt, synthetic construct
  source 1..19: mol_type = other RNA
ctcgatttcctaggaaatc

SEQ ID NO: 3364 - RNA, 19 nt, synthetic construct
  source 1..19: mol_type = other RNA
tcgatttcctaggaaatca

SEQ ID NO: 3365 - RNA, 19 nt, synthetic construct
  source 1..19: mol_type = other RNA
cgatttcctaggaaatcaa

SEQ ID NO: 3366 - RNA, 19 nt, synthetic construct
  source 1..19: mol_type = other RNA
gatttcctaggaaatcaac

SEQ ID NO: 3367 - RNA, 19 nt, synthetic construct
  source 1..19: mol_type = other RNA
atttcctaggaaatcaact

SEQ ID NO: 3368 - RNA, 19 nt, synthetic construct
  source 1..19: mol_type = other RNA
tttcctaggaaatcaactt

SEQ ID NO: 3369 - RNA, 19 nt, synthetic construct
  source 1..19: mol_type = other RNA
ttcctaggaaatcaacttt

SEQ ID NO: 3370 - RNA, 19 nt, synthetic construct
  source 1..19: mol_type = other RNA
tcctaggaaatcaactttt

SEQ ID NO: 3371 - RNA, 19 nt, synthetic construct
  source 1..19: mol_type = other RNA
cctaggaaatcaacttttt

SEQ ID NO: 3372 - RNA, 19 nt, synthetic construct
  source 1..19: mol_type = other RNA
ctaggaaatcaactttttc

SEQ ID NO: 3373 - RNA, 19 nt, synthetic construct
  source 1..19: mol_type = other RNA
taggaaatcaactttttcc

SEQ ID NO: 3374 - RNA, 19 nt, synthetic construct
  source 1..19: mol_type = other RNA
aggaaatcaactttttcct

SEQ ID NO: 3375 - RNA, 19 nt, synthetic construct
  source 1..19: mol_type = other RNA
ggaaatcaactttttcctt

SEQ ID NO: 3376 - RNA, 19 nt, synthetic construct
  source 1..19: mol_type = other RNA
gaaatcaactttttcctta

SEQ ID NO: 3377 - RNA, 19 nt, synthetic construct
  source 1..19: mol_type = other RNA
aaatcaactttttccttaa

SEQ ID NO: 3378 - RNA, 19 nt, synthetic construct
  source 1..19: mol_type = other RNA
aatcaactttttccttaaa

SEQ ID NO: 3379 - RNA, 19 nt, synthetic construct
  source 1..19: mol_type = other RNA
atcaactttttccttaaaa

SEQ ID NO: 3380 - RNA, 19 nt, synthetic construct
  source 1..19: mol_type = other RNA
tcaactttttccttaaaat

SEQ ID NO: 3381 - RNA, 19 nt, synthetic construct
  source 1..19: mol_type = other RNA
caactttttccttaaaatc

SEQ ID NO: 3382 - RNA, 19 nt, synthetic construct
  source 1..19: mol_type = other RNA
aactttttccttaaaatct

SEQ ID NO: 3383 - RNA, 19 nt, synthetic construct
  source 1..19: mol_type = other RNA
actttttccttaaaatctc

SEQ ID NO: 3384 - RNA, 19 nt, synthetic construct
  source 1..19: mol_type = other RNA
ctttttccttaaaatctcc

SEQ ID NO: 3385 - RNA, 19 nt, synthetic construct
  source 1..19: mol_type = other RNA
tttttccttaaaatctcct

SEQ ID NO: 3386 - RNA, 19 nt, synthetic construct
  source 1..19: mol_type = other RNA
ttttccttaaaatctcctg

SEQ ID NO: 3387 - RNA, 19 nt, synthetic construct
  source 1..19: mol_type = other RNA
tttccttaaaatctcctgg

SEQ ID NO: 3388 - RNA, 19 nt, synthetic construct
  source 1..19: mol_type = other RNA
ttccttaaaatctcctgga

SEQ ID NO: 3389 - RNA, 19 nt, synthetic construct
  source 1..19: mol_type = other RNA
tccttaaaatctcctggaa

SEQ ID NO: 3390 - RNA, 19 nt, synthetic construct
  source 1..19: mol_type = other RNA
ccttaaaatctcctggaat

SEQ ID NO: 3391 - RNA, 19 nt, synthetic construct
  source 1..19: mol_type = other RNA
cttaaaatctcctggaata

SEQ ID NO: 3392 - RNA, 19 nt, synthetic construct
  source 1..19: mol_type = other RNA
ttaaaatctcctggaataa

SEQ ID NO: 3393 - RNA, 19 nt, synthetic construct
  source 1..19: mol_type = other RNA
taaaatctcctggaataag

SEQ ID NO: 3394 - RNA, 19 nt, synthetic construct
  source 1..19: mol_type = other RNA
aaaatctcctggaataagg

SEQ ID NO: 3395 - RNA, 19 nt, synthetic construct
  source 1..19: mol_type = other RNA
aaatctcctggaataaggc

SEQ ID NO: 3396 - RNA, 19 nt, synthetic construct
  source 1..19: mol_type = other RNA
aatctcctggaataaggcc

SEQ ID NO: 3397 - RNA, 19 nt, synthetic construct
  source 1..19: mol_type = other RNA
atctcctggaataaggcct

SEQ ID NO: 3398 - RNA, 19 nt, synthetic construct
  source 1..19: mol_type = other RNA
tctcctggaataaggccta

SEQ ID NO: 3399 - RNA, 19 nt, synthetic construct
  source 1..19: mol_type = other RNA
ctcctggaataaggcctaa

SEQ ID NO: 3400 - RNA, 19 nt, synthetic construct
  source 1..19: mol_type = other RNA
tcctggaataaggcctaac

SEQ ID NO: 3401 - RNA, 19 nt, synthetic construct
  source 1..19: mol_type = other RNA
cctggaataaggcctaaca

SEQ ID NO: 3402 - RNA, 19 nt, synthetic construct
  source 1..19: mol_type = other RNA
ctggaataaggcctaacac

SEQ ID NO: 3403 - RNA, 19 nt, synthetic construct
  source 1..19: mol_type = other RNA
tggaataaggcctaacaca

SEQ ID NO: 3404 - RNA, 19 nt, synthetic construct
  source 1..19: mol_type = other RNA
ggaataaggcctaacacag

SEQ ID NO: 3405 - RNA, 19 nt, synthetic construct
  source 1..19: mol_type = other RNA
gaataaggcctaacacagg

SEQ ID NO: 3406 - RNA, 19 nt, synthetic construct
  source 1..19: mol_type = other RNA
aataaggcctaacacaggc

SEQ ID NO: 3407 - RNA, 19 nt, synthetic construct
  source 1..19: mol_type = other RNA
ataaggcctaacacaggcc

SEQ ID NO: 3408 - RNA, 19 nt, synthetic construct
  source 1..19: mol_type = other RNA
taaggcctaacacaggccg

SEQ ID NO: 3409 - RNA, 19 nt, synthetic construct
  source 1..19: mol_type = other RNA
aaggcctaacacaggccga

SEQ ID NO: 3410 - RNA, 19 nt, synthetic construct
  source 1..19: mol_type = other RNA
aggcctaacacaggccgac

SEQ ID NO: 3411 - RNA, 19 nt, synthetic construct
  source 1..19: mol_type = other RNA
ggcctaacacaggccgaca

SEQ ID NO: 3412 - RNA, 19 nt, synthetic construct
  source 1..19: mol_type = other RNA
gcctaacacaggccgacat

SEQ ID NO: 3413 - RNA, 19 nt, synthetic construct
  source 1..19: mol_type = other RNA
cctaacacaggccgacatg

SEQ ID NO: 3414 - RNA, 19 nt, synthetic construct
  source 1..19: mol_type = other RNA
ctaacacaggccgacatgg

SEQ ID NO: 3415 - RNA, 19 nt, synthetic construct
  source 1..19: mol_type = other RNA
taacacaggccgacatggc

SEQ ID NO: 3416 - RNA, 19 nt, synthetic construct
  source 1..19: mol_type = other RNA
aacacaggccgacatggct

SEQ ID NO: 3417 - RNA, 19 nt, synthetic construct
  source 1..19: mol_type = other RNA
acacaggccgacatggctc

SEQ ID NO: 3418 - RNA, 19 nt, synthetic construct
  source 1..19: mol_type = other RNA
cacaggccgacatggctct

SEQ ID NO: 3419 - RNA, 19 nt, synthetic construct
  source 1..19: mol_type = other RNA
acaggccgacatggctcta

SEQ ID NO: 3420 - RNA, 19 nt, synthetic construct
  source 1..19: mol_type = other RNA
caggccgacatggctctac

SEQ ID NO: 3421 - RNA, 19 nt, synthetic construct
  source 1..19: mol_type = other RNA
aggccgacatggctctacc

SEQ ID NO: 3422 - RNA, 19 nt, synthetic construct
  source 1..19: mol_type = other RNA
ggccgacatggctctacct

SEQ ID NO: 3423 - RNA, 19 nt, synthetic construct
  source 1..19: mol_type = other RNA
gccgacatggctctacctc

SEQ ID NO: 3424 - RNA, 19 nt, synthetic construct
  source 1..19: mol_type = other RNA
ccgacatggctctacctca

SEQ ID NO: 3425 - RNA, 19 nt, synthetic construct
  source 1..19: mol_type = other RNA
cgacatggctctacctcag

SEQ ID NO: 3426 - RNA, 19 nt, synthetic construct
  source 1..19: mol_type = other RNA
gacatggctctacctcagg

SEQ ID NO: 3427 - RNA, 19 nt, synthetic construct
  source 1..19: mol_type = other RNA
acatggctctacctcaggt

SEQ ID NO: 3428 - RNA, 19 nt, synthetic construct
  source 1..19: mol_type = other RNA
catggctctacctcaggta

SEQ ID NO: 3429 - RNA, 19 nt, synthetic construct
  source 1..19: mol_type = other RNA
atggctctacctcaggtac

SEQ ID NO: 3430 - RNA, 19 nt, synthetic construct
  source 1..19: mol_type = other RNA
tggctctacctcaggtact

SEQ ID NO: 3431 - RNA, 19 nt, synthetic construct
  source 1..19: mol_type = other RNA
ggctctacctcaggtactt

SEQ ID NO: 3432 - RNA, 19 nt, synthetic construct
  source 1..19: mol_type = other RNA
gctctacctcaggtacttt

SEQ ID NO: 3433 - RNA, 19 nt, synthetic construct
  source 1..19: mol_type = other RNA
ctctacctcaggtacttta

SEQ ID NO: 3434 - RNA, 19 nt, synthetic construct
  source 1..19: mol_type = other RNA
tctacctcaggtactttac

SEQ ID NO: 3435 - RNA, 19 nt, synthetic construct
  source 1..19: mol_type = other RNA
ctacctcaggtactttacg

SEQ ID NO: 3436 - RNA, 19 nt, synthetic construct
  source 1..19: mol_type = other RNA
tacctcaggtactttacga

SEQ ID NO: 3437 - RNA, 19 nt, synthetic construct
  source 1..19: mol_type = other RNA
acctcaggtactttacgag

SEQ ID NO: 3438 - RNA, 19 nt, synthetic construct
  source 1..19: mol_type = other RNA
cctcaggtactttacgagg

SEQ ID NO: 3439 - RNA, 19 nt, synthetic construct
  source 1..19: mol_type = other RNA
ctcaggtactttacgaggt

SEQ ID NO: 3440 - RNA, 19 nt, synthetic construct
  source 1..19: mol_type = other RNA
tcaggtactttacgaggtc

SEQ ID NO: 3441 - RNA, 19 nt, synthetic construct
  source 1..19: mol_type = other RNA
caggtactttacgaggtca

SEQ ID NO: 3442 - RNA, 19 nt, synthetic construct
  source 1..19: mol_type = other RNA
aggtactttacgaggtcac

SEQ ID NO: 3443 - RNA, 19 nt, synthetic construct
  source 1..19: mol_type = other RNA
ggtactttacgaggtcacc

SEQ ID NO: 3444 - RNA, 19 nt, synthetic construct
  source 1..19: mol_type = other RNA
gtactttacgaggtcaccc

SEQ ID NO: 3445 - RNA, 19 nt, synthetic construct
  source 1..19: mol_type = other RNA
tactttacgaggtcaccca

SEQ ID NO: 3446 - RNA, 19 nt, synthetic construct
  source 1..19: mol_type = other RNA
actttacgaggtcacccaa

SEQ ID NO: 3447 - RNA, 19 nt, synthetic construct
  source 1..19: mol_type = other RNA
ctttacgaggtcacccaac

SEQ ID NO: 3448 - RNA, 19 nt, synthetic construct
  source 1..19: mol_type = other RNA
tttacgaggtcacccaaca

SEQ ID NO: 3449 - RNA, 19 nt, synthetic construct
  source 1..19: mol_type = other RNA
ttacgaggtcacccaacac

SEQ ID NO: 3450 - RNA, 19 nt, synthetic construct
  source 1..19: mol_type = other RNA
tacgaggtcacccaacacc

SEQ ID NO: 3451 - RNA, 19 nt, synthetic construct
  source 1..19: mol_type = other RNA
acgaggtcacccaacacca

SEQ ID NO: 3452 - RNA, 19 nt, synthetic construct
  source 1..19: mol_type = other RNA
cgaggtcacccaacaccat

SEQ ID NO: 3453 - RNA, 19 nt, synthetic construct
  source 1..19: mol_type = other RNA
gaggtcacccaacaccatt

SEQ ID NO: 3454 - RNA, 19 nt, synthetic construct
  source 1..19: mol_type = other RNA
aggtcacccaacaccatta

SEQ ID NO: 3455 - RNA, 19 nt, synthetic construct
  source 1..19: mol_type = other RNA
ggtcacccaacaccattag

SEQ ID NO: 3456 - RNA, 19 nt, synthetic construct
  source 1..19: mol_type = other RNA
gtcacccaacaccattaga

SEQ ID NO: 3457 - RNA, 19 nt, synthetic construct
  source 1..19: mol_type = other RNA
tcacccaacaccattagaa

SEQ ID NO: 3458 - RNA, 19 nt, synthetic construct
  source 1..19: mol_type = other RNA
cacccaacaccattagaaa

SEQ ID NO: 3459 - RNA, 19 nt, synthetic construct
  source 1..19: mol_type = other RNA
acccaacaccattagaaag

SEQ ID NO: 3460 - RNA, 19 nt, synthetic construct
  source 1..19: mol_type = other RNA
cccaacaccattagaaaga

SEQ ID NO: 3461 - RNA, 19 nt, synthetic construct
  source 1..19: mol_type = other RNA
ccaacaccattagaaagag

SEQ ID NO: 3462 - RNA, 19 nt, synthetic construct
  source 1..19: mol_type = other RNA
caacaccattagaaagaga

SEQ ID NO: 3463 - RNA, 19 nt, synthetic construct
  source 1..19: mol_type = other RNA
aacaccattagaaagagaa

SEQ ID NO: 3464 - RNA, 19 nt, synthetic construct
  source 1..19: mol_type = other RNA
acaccattagaaagagaac

SEQ ID NO: 3465 - RNA, 19 nt, synthetic construct
  source 1..19: mol_type = other RNA
caccattagaaagagaacc

SEQ ID NO: 3466 - RNA, 19 nt, synthetic construct
  source 1..19: mol_type = other RNA
accattagaaagagaacca

SEQ ID NO: 3467 - RNA, 19 nt, synthetic construct
  source 1..19: mol_type = other RNA
ccattagaaagagaaccat

SEQ ID NO: 3468 - RNA, 19 nt, synthetic construct
  source 1..19: mol_type = other RNA
cattagaaagagaaccatg

SEQ ID NO: 3469 - RNA, 19 nt, synthetic construct
  source 1..19: mol_type = other RNA
attagaaagagaaccatgt

SEQ ID NO: 3470 - RNA, 19 nt, synthetic construct
  source 1..19: mol_type = other RNA
ttagaaagagaaccatgta

SEQ ID NO: 3471 - RNA, 19 nt, synthetic construct
  source 1..19: mol_type = other RNA
tagaaagagaaccatgtaa

SEQ ID NO: 3472 - RNA, 19 nt, synthetic construct
  source 1..19: mol_type = other RNA
agaaagagaaccatgtaaa

SEQ ID NO: 3473 - RNA, 19 nt, synthetic construct
  source 1..19: mol_type = other RNA
gaaagagaaccatgtaaaa

SEQ ID NO: 3474 - RNA, 19 nt, synthetic construct
  source 1..19: mol_type = other RNA
aaagagaaccatgtaaaat

SEQ ID NO: 3475 - RNA, 19 nt, synthetic construct
  source 1..19: mol_type = other RNA
aagagaaccatgtaaaata

SEQ ID NO: 3476 - RNA, 19 nt, synthetic construct
  source 1..19: mol_type = other RNA
agagaaccatgtaaaataa

SEQ ID NO: 3477 - RNA, 19 nt, synthetic construct
  source 1..19: mol_type = other RNA
gagaaccatgtaaaataag

SEQ ID NO: 3478 - RNA, 19 nt, synthetic construct
  source 1..19: mol_type = other RNA
agaaccatgtaaaataagc

SEQ ID NO: 3479 - RNA, 19 nt, synthetic construct
  source 1..19: mol_type = other RNA
gaaccatgtaaaataagct

SEQ ID NO: 3480 - RNA, 19 nt, synthetic construct
  source 1..19: mol_type = other RNA
aaccatgtaaaataagctt

SEQ ID NO: 3481 - RNA, 19 nt, synthetic construct
  source 1..19: mol_type = other RNA
accatgtaaaataagcttt

SEQ ID NO: 3482 - RNA, 19 nt, synthetic construct
  source 1..19: mol_type = other RNA
ccatgtaaaataagcttta

SEQ ID NO: 3483 - RNA, 19 nt, synthetic construct
  source 1..19: mol_type = other RNA
catgtaaaataagctttag

SEQ ID NO: 3484 - RNA, 19 nt, synthetic construct
  source 1..19: mol_type = other RNA
atgtaaaataagctttagt

SEQ ID NO: 3485 - RNA, 19 nt, synthetic construct
  source 1..19: mol_type = other RNA
tgtaaaataagctttagtc

SEQ ID NO: 3486 - RNA, 19 nt, synthetic construct
  source 1..19: mol_type = other RNA
gtaaaataagctttagtcg

SEQ ID NO: 3487 - RNA, 19 nt, synthetic construct
  source 1..19: mol_type = other RNA
taaaataagctttagtcgg

SEQ ID NO: 3488 - RNA, 19 nt, synthetic construct
  source 1..19: mol_type = other RNA
aaaataagctttagtcgga

SEQ ID NO: 3489 - RNA, 19 nt, synthetic construct
  source 1..19: mol_type = other RNA
aaataagctttagtcggat

SEQ ID NO: 3490 - RNA, 19 nt, synthetic construct
  source 1..19: mol_type = other RNA
aataagctttagtcggatt

SEQ ID NO: 3491 - RNA, 19 nt, synthetic construct
  source 1..19: mol_type = other RNA
ataagctttagtcggattg

SEQ ID NO: 3492 - RNA, 19 nt, synthetic construct
  source 1..19: mol_type = other RNA
taagctttagtcggattgc

SEQ ID NO: 3493 - RNA, 19 nt, synthetic construct
  source 1..19: mol_type = other RNA
aagctttagtcggattgct

SEQ ID NO: 3494 - RNA, 19 nt, synthetic construct
  source 1..19: mol_type = other RNA
agctttagtcggattgctg

SEQ ID NO: 3495 - RNA, 19 nt, synthetic construct
  source 1..19: mol_type = other RNA
gctttagtcggattgctga

SEQ ID NO: 3496 - RNA, 19 nt, synthetic construct
  source 1..19: mol_type = other RNA
ctttagtcggattgctgaa

SEQ ID NO: 3497 - RNA, 19 nt, synthetic construct
  source 1..19: mol_type = other RNA
tttagtcggattgctgaaa

SEQ ID NO: 3498 - RNA, 19 nt, synthetic construct
  source 1..19: mol_type = other RNA
ttagtcggattgctgaaac

SEQ ID NO: 3499 - RNA, 19 nt, synthetic construct
  source 1..19: mol_type = other RNA
tagtcggattgctgaaact

SEQ ID NO: 3500 - RNA, 19 nt, synthetic construct
  source 1..19: mol_type = other RNA
agtcggattgctgaaactg

SEQ ID NO: 3501 - RNA, 19 nt, synthetic construct
  source 1..19: mol_type = other RNA
gtcggattgctgaaactga

SEQ ID NO: 3502 - RNA, 19 nt, synthetic construct
  source 1..19: mol_type = other RNA
tcggattgctgaaactgag

SEQ ID NO: 3503 - RNA, 19 nt, synthetic construct
  source 1..19: mol_type = other RNA
cggattgctgaaactgagc

SEQ ID NO: 3504 - RNA, 19 nt, synthetic construct
  source 1..19: mol_type = other RNA
ggattgctgaaactgagct

SEQ ID NO: 3505 - RNA, 19 nt, synthetic construct
  source 1..19: mol_type = other RNA
gattgctgaaactgagctg

SEQ ID NO: 3506 - RNA, 19 nt, synthetic construct
  source 1..19: mol_type = other RNA
attgctgaaactgagctgg

SEQ ID NO: 3507 - RNA, 19 nt, synthetic construct
  source 1..19: mol_type = other RNA
ttgctgaaactgagctgga

SEQ ID NO: 3508 - RNA, 19 nt, synthetic construct
  source 1..19: mol_type = other RNA
tgctgaaactgagctggaa

SEQ ID NO: 3509 - RNA, 19 nt, synthetic construct
  source 1..19: mol_type = other RNA
gctgaaactgagctggaat

SEQ ID NO: 3510 - RNA, 19 nt, synthetic construct
  source 1..19: mol_type = other RNA
ctgaaactgagctggaatc

SEQ ID NO: 3511 - RNA, 19 nt, synthetic construct
  source 1..19: mol_type = other RNA
tgaaactgagctggaatca

SEQ ID NO: 3512 - RNA, 19 nt, synthetic construct
  source 1..19: mol_type = other RNA
gaaactgagctggaatcaa

SEQ ID NO: 3513 - RNA, 19 nt, synthetic construct
  source 1..19: mol_type = other RNA
aaactgagctggaatcaac

SEQ ID NO: 3514 - RNA, 19 nt, synthetic construct
  source 1..19: mol_type = other RNA
aactgagctggaatcaaca

SEQ ID NO: 3515 - RNA, 19 nt, synthetic construct
  source 1..19: mol_type = other RNA
actgagctggaatcaacag

SEQ ID NO: 3516 - RNA, 19 nt, synthetic construct
  source 1..19: mol_type = other RNA
ctgagctggaatcaacagt

SEQ ID NO: 3517 - RNA, 19 nt, synthetic construct
  source 1..19: mol_type = other RNA
tgagctggaatcaacagtg

SEQ ID NO: 3518 - RNA, 19 nt, synthetic construct
  source 1..19: mol_type = other RNA
gagctggaatcaacagtgt

SEQ ID NO: 3519 - RNA, 19 nt, synthetic construct
  source 1..19: mol_type = other RNA
agctggaatcaacagtgtc

SEQ ID NO: 3520 - RNA, 19 nt, synthetic construct
  source 1..19: mol_type = other RNA
gctggaatcaacagtgtca

SEQ ID NO: 3521 - RNA, 19 nt, synthetic construct
  source 1..19: mol_type = other RNA
ctggaatcaacagtgtcag

SEQ ID NO: 3522 - RNA, 19 nt, synthetic construct
  source 1..19: mol_type = other RNA
tggaatcaacagtgtcagc

SEQ ID NO: 3523 - RNA, 19 nt, synthetic construct
  source 1..19: mol_type = other RNA
ggaatcaacagtgtcagca

SEQ ID NO: 3524 - RNA, 19 nt, synthetic construct
  source 1..19: mol_type = other RNA
gaatcaacagtgtcagcac

SEQ ID NO: 3525 - RNA, 19 nt, synthetic construct
  source 1..19: mol_type = other RNA
aatcaacagtgtcagcacc

SEQ ID NO: 3526 - RNA, 19 nt, synthetic construct
  source 1..19: mol_type = other RNA
atcaacagtgtcagcacca

SEQ ID NO: 3527 - RNA, 19 nt, synthetic construct
  source 1..19: mol_type = other RNA
tcaacagtgtcagcaccaa

SEQ ID NO: 3528 - RNA, 19 nt, synthetic construct
  source 1..19: mol_type = other RNA
caacagtgtcagcaccaac

SEQ ID NO: 3529 - RNA, 19 nt, synthetic construct
  source 1..19: mol_type = other RNA
aacagtgtcagcaccaacc

SEQ ID NO: 3530 - RNA, 19 nt, synthetic construct
  source 1..19: mol_type = other RNA
acagtgtcagcaccaacct

SEQ ID NO: 3531 - RNA, 19 nt, synthetic construct
  source 1..19: mol_type = other RNA
cagtgtcagcaccaacctc

SEQ ID NO: 3532 - RNA, 19 nt, synthetic construct
  source 1..19: mol_type = other RNA
agtgtcagcaccaacctct

SEQ ID NO: 3533 - RNA, 19 nt, synthetic construct
  source 1..19: mol_type = other RNA
gtgtcagcaccaacctctc

SEQ ID NO: 3534 - RNA, 19 nt, synthetic construct
  source 1..19: mol_type = other RNA
tgtcagcaccaacctctcc

SEQ ID NO: 3535 - RNA, 19 nt, synthetic construct
  source 1..19: mol_type = other RNA
gtcagcaccaacctctcca

SEQ ID NO: 3536 - RNA, 19 nt, synthetic construct
  source 1..19: mol_type = other RNA
tcagcaccaacctctccaa

SEQ ID NO: 3537 - RNA, 19 nt, synthetic construct
  source 1..19: mol_type = other RNA
cagcaccaacctctccaaa

SEQ ID NO: 3538 - RNA, 19 nt, synthetic construct
  source 1..19: mol_type = other RNA
agcaccaacctctccaaat

SEQ ID NO: 3539 - RNA, 19 nt, synthetic construct
  source 1..19: mol_type = other RNA
gcaccaacctctccaaata

SEQ ID NO: 3540 - RNA, 19 nt, synthetic construct
  source 1..19: mol_type = other RNA
caccaacctctccaaatac

SEQ ID NO: 3541 - RNA, 19 nt, synthetic construct
  source 1..19: mol_type = other RNA
accaacctctccaaataca

SEQ ID NO: 3542 - RNA, 19 nt, synthetic construct
  source 1..19: mol_type = other RNA
ccaacctctccaaatacac

SEQ ID NO: 3543 - RNA, 19 nt, synthetic construct
  source 1..19: mol_type = other RNA
caacctctccaaatacacc

SEQ ID NO: 3544 - RNA, 19 nt, synthetic construct
  source 1..19: mol_type = other RNA
aacctctccaaatacacca

SEQ ID NO: 3545 - RNA, 19 nt, synthetic construct
  source 1..19: mol_type = other RNA
acctctccaaatacaccat

SEQ ID NO: 3546 - RNA, 19 nt, synthetic construct
  source 1..19: mol_type = other RNA
cctctccaaatacaccatc

SEQ ID NO: 3547 - RNA, 19 nt, synthetic construct
  source 1..19: mol_type = other RNA
ctctccaaatacaccatct

SEQ ID NO: 3548 - RNA, 19 nt, synthetic construct
  source 1..19: mol_type = other RNA
tctccaaatacaccatcta

SEQ ID NO: 3549 - RNA, 19 nt, synthetic construct
  source 1..19: mol_type = other RNA
ctccaaatacaccatctac

SEQ ID NO: 3550 - RNA, 19 nt, synthetic construct
  source 1..19: mol_type = other RNA
tccaaatacaccatctact

SEQ ID NO: 3551 - RNA, 19 nt, synthetic construct
  source 1..19: mol_type = other RNA
ccaaatacaccatctactc

SEQ ID NO: 3552 - RNA, 19 nt, synthetic construct
  source 1..19: mol_type = other RNA
caaatacaccatctactcc

SEQ ID NO: 3553 - RNA, 19 nt, synthetic construct
  source 1..19: mol_type = other RNA
aaatacaccatctactcca

SEQ ID NO: 3554 - RNA, 19 nt, synthetic construct
  source 1..19: mol_type = other RNA
aatacaccatctactccac

SEQ ID NO: 3555 - RNA, 19 nt, synthetic construct
  source 1..19: mol_type = other RNA
atacaccatctactccacc

SEQ ID NO: 3556 - RNA, 19 nt, synthetic construct
  source 1..19: mol_type = other RNA
tacaccatctactccacca

SEQ ID NO: 3557 - RNA, 19 nt, synthetic construct
  source 1..19: mol_type = other RNA
acaccatctactccaccag

SEQ ID NO: 3558 - RNA, 19 nt, synthetic construct
  source 1..19: mol_type = other RNA
caccatctactccaccagt

SEQ ID NO: 3559 - RNA, 19 nt, synthetic construct
  source 1..19: mol_type = other RNA
accatctactccaccagta

SEQ ID NO: 3560 - RNA, 19 nt, synthetic construct
  source 1..19: mol_type = other RNA
ccatctactccaccagtat

SEQ ID NO: 3561 - RNA, 19 nt, synthetic construct
  source 1..19: mol_type = other RNA
catctactccaccagtatc

SEQ ID NO: 3562 - RNA, 19 nt, synthetic construct
  source 1..19: mol_type = other RNA
atctactccaccagtatct

SEQ ID NO: 3563 - RNA, 19 nt, synthetic construct
  source 1..19: mol_type = other RNA
tctactccaccagtatctg

SEQ ID NO: 3564 - RNA, 19 nt, synthetic construct
  source 1..19: mol_type = other RNA
ctactccaccagtatctgc

SEQ ID NO: 3565 - RNA, 19 nt, synthetic construct
  source 1..19: mol_type = other RNA
tactccaccagtatctgct

SEQ ID NO: 3566 - RNA, 19 nt, synthetic construct
  source 1..19: mol_type = other RNA
actccaccagtatctgctt

SEQ ID NO: 3567 - RNA, 19 nt, synthetic construct
  source 1..19: mol_type = other RNA
ctccaccagtatctgcttc

SEQ ID NO: 3568 - RNA, 19 nt, synthetic construct
  source 1..19: mol_type = other RNA
tccaccagtatctgcttct

SEQ ID NO: 3569 - RNA, 19 nt, synthetic construct
  source 1..19: mol_type = other RNA
ccaccagtatctgcttctt

SEQ ID NO: 3570 - RNA, 19 nt, synthetic construct
  source 1..19: mol_type = other RNA
caccagtatctgcttcttc

SEQ ID NO: 3571 - RNA, 19 nt, synthetic construct
  source 1..19: mol_type = other RNA
accagtatctgcttcttca

SEQ ID NO: 3572 - RNA, 19 nt, synthetic construct
  source 1..19: mol_type = other RNA
ccagtatctgcttcttcag

SEQ ID NO: 3573 - RNA, 19 nt, synthetic construct
  source 1..19: mol_type = other RNA
cagtatctgcttcttcaga

SEQ ID NO: 3574 - RNA, 19 nt, synthetic construct
  source 1..19: mol_type = other RNA
agtatctgcttcttcagac

SEQ ID NO: 3575 - RNA, 19 nt, synthetic construct
  source 1..19: mol_type = other RNA
gtatctgcttcttcagacc

SEQ ID NO: 3576 - RNA, 19 nt, synthetic construct
  source 1..19: mol_type = other RNA
tatctgcttcttcagacct

SEQ ID NO: 3577 - RNA, 19 nt, synthetic construct
  source 1..19: mol_type = other RNA
atctgcttcttcagacctt

SEQ ID NO: 3578 - RNA, 19 nt, synthetic construct
  source 1..19: mol_type = other RNA
tctgcttcttcagacctta

SEQ ID NO: 3579 - RNA, 19 nt, synthetic construct
  source 1..19: mol_type = other RNA
ctgcttcttcagaccttag

SEQ ID NO: 3580 - RNA, 19 nt, synthetic construct
  source 1..19: mol_type = other RNA
tgcttcttcagaccttagt

SEQ ID NO: 3581 - RNA, 19 nt, synthetic construct
  source 1..19: mol_type = other RNA
gcttcttcagaccttagtg

SEQ ID NO: 3582 - RNA, 19 nt, synthetic construct
  source 1..19: mol_type = other RNA
cttcttcagaccttagtgt

SEQ ID NO: 3583 - RNA, 19 nt, synthetic construct
  source 1..19: mol_type = other RNA
ttcttcagaccttagtgta

SEQ ID NO: 3584 - RNA, 19 nt, synthetic construct
  source 1..19: mol_type = other RNA
tcttcagaccttagtgtat

SEQ ID NO: 3585 - RNA, 19 nt, synthetic construct
  source 1..19: mol_type = other RNA
cttcagaccttagtgtatt

SEQ ID NO: 3586 - RNA, 19 nt, synthetic construct
  source 1..19: mol_type = other RNA
ttcagaccttagtgtattt

SEQ ID NO: 3587 - RNA, 19 nt, synthetic construct
  source 1..19: mol_type = other RNA
tcagaccttagtgtatttt

SEQ ID NO: 3588 - RNA, 19 nt, synthetic construct
  source 1..19: mol_type = other RNA
cagaccttagtgtattttt

SEQ ID NO: 3589 - RNA, 19 nt, synthetic construct
  source 1..19: mol_type = other RNA
agaccttagtgtattttta

SEQ ID NO: 3590 - RNA, 19 nt, synthetic construct
  source 1..19: mol_type = other RNA
gaccttagtgtatttttag

SEQ ID NO: 3591 - RNA, 19 nt, synthetic construct
  source 1..19: mol_type = other RNA
accttagtgtatttttaga

SEQ ID NO: 3592 - RNA, 19 nt, synthetic construct
  source 1..19: mol_type = other RNA
ccttagtgtatttttagat

SEQ ID NO: 3593 - RNA, 19 nt, synthetic construct
  source 1..19: mol_type = other RNA
cttagtgtatttttagatg

SEQ ID NO: 3594 - RNA, 19 nt, synthetic construct
  source 1..19: mol_type = other RNA
ttagtgtatttttagatgt

SEQ ID NO: 3595 - RNA, 19 nt, synthetic construct
  source 1..19: mol_type = other RNA
tagtgtatttttagatgtg

SEQ ID NO: 3596 - RNA, 19 nt, synthetic construct
  source 1..19: mol_type = other RNA
agtgtatttttagatgtgg

SEQ ID NO: 3597 - RNA, 19 nt, synthetic construct
  source 1..19: mol_type = other RNA
gtgtatttttagatgtgga

SEQ ID NO: 3598 - RNA, 19 nt, synthetic construct
  source 1..19: mol_type = other RNA
tgtatttttagatgtggat

SEQ ID NO: 3599 - RNA, 19 nt, synthetic construct
  source 1..19: mol_type = other RNA
gtatttttagatgtggatc

SEQ ID NO: 3600 - RNA, 19 nt, synthetic construct
  source 1..19: mol_type = other RNA
tatttttagatgtggatct

SEQ ID NO: 3601 - RNA, 19 nt, synthetic construct
  source 1..19: mol_type = other RNA
atttttagatgtggatctc

SEQ ID NO: 3602 - RNA, 19 nt, synthetic construct
  source 1..19: mol_type = other RNA
tttttagatgtggatctca

SEQ ID NO: 3603 - RNA, 19 nt, synthetic construct
  source 1..19: mol_type = other RNA
ttttagatgtggatctcaa

SEQ ID NO: 3604 - RNA, 19 nt, synthetic construct
  source 1..19: mol_type = other RNA
tttagatgtggatctcaac

SEQ ID NO: 3605 - RNA, 19 nt, synthetic construct
  source 1..19: mol_type = other RNA
ttagatgtggatctcaaca

SEQ ID NO: 3606 - RNA, 19 nt, synthetic construct
  source 1..19: mol_type = other RNA
tagatgtggatctcaacag

SEQ ID NO: 3607 - RNA, 19 nt, synthetic construct
  source 1..19: mol_type = other RNA
agatgtggatctcaacagc

SEQ ID NO: 3608 - RNA, 19 nt, synthetic construct
  source 1..19: mol_type = other RNA
gatgtggatctcaacagct

SEQ ID NO: 3609 - RNA, 19 nt, synthetic construct
  source 1..19: mol_type = other RNA
atgtggatctcaacagctc

SEQ ID NO: 3610 - RNA, 19 nt, synthetic construct
  source 1..19: mol_type = other RNA
tgtggatctcaacagctcc

SEQ ID NO: 3611 - RNA, 19 nt, synthetic construct
  source 1..19: mol_type = other RNA
gtggatctcaacagctcct

SEQ ID NO: 3612 - RNA, 19 nt, synthetic construct
  source 1..19: mol_type = other RNA
tggatctcaacagctcctg

SEQ ID NO: 3613 - RNA, 19 nt, synthetic construct
  source 1..19: mol_type = other RNA
ggatctcaacagctcctgt

SEQ ID NO: 3614 - RNA, 19 nt, synthetic construct
  source 1..19: mol_type = other RNA
gatctcaacagctcctgtg

SEQ ID NO: 3615 - RNA, 19 nt, synthetic construct
  source 1..19: mol_type = other RNA
atctcaacagctcctgtgg

SEQ ID NO: 3616 - RNA, 19 nt, synthetic construct
  source 1..19: mol_type = other RNA
tctcaacagctcctgtggc

SEQ ID NO: 3617 - RNA, 19 nt, synthetic construct
  source 1..19: mol_type = other RNA
ctcaacagctcctgtggca

SEQ ID NO: 3618 - RNA, 19 nt, synthetic construct
  source 1..19: mol_type = other RNA
tcaacagctcctgtggcag

SEQ ID NO: 3619 - RNA, 19 nt, synthetic construct
  source 1..19: mol_type = other RNA
caacagctcctgtggcagc

SEQ ID NO: 3620 - RNA, 19 nt, synthetic construct
  source 1..19: mol_type = other RNA
aacagctcctgtggcagca

SEQ ID NO: 3621 - RNA, 19 nt, synthetic construct
  source 1..19: mol_type = other RNA
acagctcctgtggcagcaa

SEQ ID NO: 3622 - RNA, 19 nt, synthetic construct
  source 1..19: mol_type = other RNA
cagctcctgtggcagcaat

SEQ ID NO: 3623 - RNA, 19 nt, synthetic construct
  source 1..19: mol_type = other RNA
agctcctgtggcagcaata

SEQ ID NO: 3624 - RNA, 19 nt, synthetic construct
  source 1..19: mol_type = other RNA
gctcctgtggcagcaatag

SEQ ID NO: 3625 - RNA, 19 nt, synthetic construct
  source 1..19: mol_type = other RNA
ctcctgtggcagcaatagc

SEQ ID NO: 3626 - RNA, 19 nt, synthetic construct
  source 1..19: mol_type = other RNA
tcctgtggcagcaatagca

SEQ ID NO: 3627 - RNA, 19 nt, synthetic construct
  source 1..19: mol_type = other RNA
cctgtggcagcaatagcat

SEQ ID NO: 3628 - RNA, 19 nt, synthetic construct
  source 1..19: mol_type = other RNA
ctgtggcagcaatagcatc

SEQ ID NO: 3629 - RNA, 19 nt, synthetic construct
  source 1..19: mol_type = other RNA
tgtggcagcaatagcatct

SEQ ID NO: 3630 - RNA, 19 nt, synthetic construct
  source 1..19: mol_type = other RNA
gtggcagcaatagcatctt

SEQ ID NO: 3631 - RNA, 19 nt, synthetic construct
  source 1..19: mol_type = other RNA
tggcagcaatagcatcttt

SEQ ID NO: 3632 - RNA, 19 nt, synthetic construct
  source 1..19: mol_type = other RNA
ggcagcaatagcatctttg

SEQ ID NO: 3633 - RNA, 19 nt, synthetic construct
  source 1..19: mol_type = other RNA
gcagcaatagcatctttgc

SEQ ID NO: 3634 - RNA, 19 nt, synthetic construct
  source 1..19: mol_type = other RNA
cagcaatagcatctttgct

SEQ ID NO: 3635 - RNA, 19 nt, synthetic construct
  source 1..19: mol_type = other RNA
agcaatagcatctttgctc

SEQ ID NO: 3636 - RNA, 19 nt, synthetic construct
  source 1..19: mol_type = other RNA
gcaatagcatctttgctcc

SEQ ID NO: 3637 - RNA, 19 nt, synthetic construct
  source 1..19: mol_type = other RNA
caatagcatctttgctcca

SEQ ID NO: 3638 - RNA, 19 nt, synthetic construct
  source 1..19: mol_type = other RNA
aatagcatctttgctccag

SEQ ID NO: 3639 - RNA, 19 nt, synthetic construct
  source 1..19: mol_type = other RNA
atagcatctttgctccagt

SEQ ID NO: 3640 - RNA, 19 nt, synthetic construct
  source 1..19: mol_type = other RNA
tagcatctttgctccagtg

SEQ ID NO: 3641 - RNA, 19 nt, synthetic construct
  source 1..19: mol_type = other RNA
agcatctttgctccagtgc

SEQ ID NO: 3642 - RNA, 19 nt, synthetic construct
  source 1..19: mol_type = other RNA
gcatctttgctccagtgct

SEQ ID NO: 3643 - RNA, 19 nt, synthetic construct
  source 1..19: mol_type = other RNA
catctttgctccagtgctt

SEQ ID NO: 3644 - RNA, 19 nt, synthetic construct
  source 1..19: mol_type = other RNA
atctttgctccagtgcttt

SEQ ID NO: 3645 - RNA, 19 nt, synthetic construct
  source 1..19: mol_type = other RNA
tctttgctccagtgctttt

SEQ ID NO: 3646 - RNA, 19 nt, synthetic construct
  source 1..19: mol_type = other RNA
ctttgctccagtgcttttg

SEQ ID NO: 3647 - RNA, 19 nt, synthetic construct
  source 1..19: mol_type = other RNA
tttgctccagtgcttttgc

SEQ ID NO: 3648 - RNA, 19 nt, synthetic construct
  source 1..19: mol_type = other RNA
ttgctccagtgcttttgcc

SEQ ID NO: 3649 - RNA, 19 nt, synthetic construct
  source 1..19: mol_type = other RNA
tgctccagtgcttttgcca

SEQ ID NO: 3650 - RNA, 19 nt, synthetic construct
  source 1..19: mol_type = other RNA
gctccagtgcttttgccac

SEQ ID NO: 3651 - RNA, 19 nt, synthetic construct
  source 1..19: mol_type = other RNA
ctccagtgcttttgccaca

SEQ ID NO: 3652 - RNA, 19 nt, synthetic construct
  source 1..19: mol_type = other RNA
tccagtgcttttgccacat

SEQ ID NO: 3653 - RNA, 19 nt, synthetic construct
  source 1..19: mol_type = other RNA
ccagtgcttttgccacatt

SEQ ID NO: 3654 - RNA, 19 nt, synthetic construct
  source 1..19: mol_type = other RNA
cagtgcttttgccacattc

SEQ ID NO: 3655 - RNA, 19 nt, synthetic construct
  source 1..19: mol_type = other RNA
agtgcttttgccacattca

SEQ ID NO: 3656 - RNA, 19 nt, synthetic construct
  source 1..19: mol_type = other RNA
gtgcttttgccacattcaa

SEQ ID NO: 3657 - RNA, 19 nt, synthetic construct
  source 1..19: mol_type = other RNA
tgcttttgccacattcaaa

SEQ ID NO: 3658 - RNA, 19 nt, synthetic construct
  source 1..19: mol_type = other RNA
gcttttgccacattcaaag

SEQ ID NO: 3659 - RNA, 19 nt, synthetic construct
  source 1..19: mol_type = other RNA
cttttgccacattcaaagt

SEQ ID NO: 3660 - RNA, 19 nt, synthetic construct
  source 1..19: mol_type = other RNA
ttttgccacattcaaagtc

SEQ ID NO: 3661 - RNA, 19 nt, synthetic construct
  source 1..19: mol_type = other RNA
tttgccacattcaaagtct

SEQ ID NO: 3662 - RNA, 19 nt, synthetic construct
  source 1..19: mol_type = other RNA
ttgccacattcaaagtctt

SEQ ID NO: 3663 - RNA, 19 nt, synthetic construct
  source 1..19: mol_type = other RNA
tgccacattcaaagtcttt

SEQ ID NO: 3664 - RNA, 19 nt, synthetic construct
  source 1..19: mol_type = other RNA
gccacattcaaagtctttc

SEQ ID NO: 3665 - RNA, 19 nt, synthetic construct
  source 1..19: mol_type = other RNA
ccacattcaaagtctttct

SEQ ID NO: 3666 - RNA, 19 nt, synthetic construct
  source 1..19: mol_type = other RNA
cacattcaaagtctttctt

SEQ ID NO: 3667 - RNA, 19 nt, synthetic construct
  source 1..19: mol_type = other RNA
acattcaaagtctttcttt

SEQ ID NO: 3668 - RNA, 19 nt, synthetic construct
  source 1..19: mol_type = other RNA
cattcaaagtctttcttta

SEQ ID NO: 3669 - RNA, 19 nt, synthetic construct
  source 1..19: mol_type = other RNA
attcaaagtctttctttag

SEQ ID NO: 3670 - RNA, 19 nt, synthetic construct
  source 1..19: mol_type = other RNA
ttcaaagtctttctttagt

SEQ ID NO: 3671 - RNA, 19 nt, synthetic construct
  source 1..19: mol_type = other RNA
tcaaagtctttctttagtt

SEQ ID NO: 3672 - RNA, 19 nt, synthetic construct
  source 1..19: mol_type = other RNA
caaagtctttctttagttc

SEQ ID NO: 3673 - RNA, 19 nt, synthetic construct
  source 1..19: mol_type = other RNA
aaagtctttctttagttca

SEQ ID NO: 3674 - RNA, 19 nt, synthetic construct
  source 1..19: mol_type = other RNA
aagtctttctttagttcat

SEQ ID NO: 3675 - RNA, 19 nt, synthetic construct
  source 1..19: mol_type = other RNA
agtctttctttagttcatg

SEQ ID NO: 3676 - RNA, 19 nt, synthetic construct
  source 1..19: mol_type = other RNA
gtctttctttagttcatgt

SEQ ID NO: 3677 - RNA, 19 nt, synthetic construct
  source 1..19: mol_type = other RNA
tctttctttagttcatgtg

SEQ ID NO: 3678 - RNA, 19 nt, synthetic construct
  source 1..19: mol_type = other RNA
ctttctttagttcatgtgg

SEQ ID NO: 3679 - RNA, 19 nt, synthetic construct
  source 1..19: mol_type = other RNA
tttctttagttcatgtggt

SEQ ID NO: 3680 - RNA, 19 nt, synthetic construct
  source 1..19: mol_type = other RNA
ttctttagttcatgtggta

SEQ ID NO: 3681 - RNA, 19 nt, synthetic construct
  source 1..19: mol_type = other RNA
tctttagttcatgtggtag

SEQ ID NO: 3682 - RNA, 19 nt, synthetic construct
  source 1..19: mol_type = other RNA
ctttagttcatgtggtagt

SEQ ID NO: 3683 - RNA, 19 nt, synthetic construct
  source 1..19: mol_type = other RNA
tttagttcatgtggtagtt

SEQ ID NO: 3684 - RNA, 19 nt, synthetic construct
  source 1..19: mol_type = other RNA
ttagttcatgtggtagttt

SEQ ID NO: 3685 - RNA, 19 nt, synthetic construct
  source 1..19: mol_type = other RNA
tagttcatgtggtagttta

SEQ ID NO: 3686 - RNA, 19 nt, synthetic construct
  source 1..19: mol_type = other RNA
agttcatgtggtagtttac

SEQ ID NO: 3687 - RNA, 19 nt, synthetic construct
  source 1..19: mol_type = other RNA
gttcatgtggtagtttaca

SEQ ID NO: 3688 - RNA, 19 nt, synthetic construct
  source 1..19: mol_type = other RNA
ttcatgtggtagtttacat

SEQ ID NO: 3689 - RNA, 19 nt, synthetic construct
  source 1..19: mol_type = other RNA
tcatgtggtagtttacata

SEQ ID NO: 3690 - RNA, 19 nt, synthetic construct
  source 1..19: mol_type = other RNA
catgtggtagtttacataa

SEQ ID NO: 3691 - RNA, 19 nt, synthetic construct
  source 1..19: mol_type = other RNA
atgtggtagtttacataaa

SEQ ID NO: 3692 - RNA, 19 nt, synthetic construct
  source 1..19: mol_type = other RNA
tgtggtagtttacataaac

SEQ ID NO: 3693 - RNA, 19 nt, synthetic construct
  source 1..19: mol_type = other RNA
gtggtagtttacataaact

SEQ ID NO: 3694 - RNA, 19 nt, synthetic construct
  source 1..19: mol_type = other RNA
tggtagtttacataaacta

SEQ ID NO: 3695 - RNA, 19 nt, synthetic construct
  source 1..19: mol_type = other RNA
ggtagtttacataaactaa

SEQ ID NO: 3696 - RNA, 19 nt, synthetic construct
  source 1..19: mol_type = other RNA
gtagtttacataaactaag

SEQ ID NO: 3697 - RNA, 19 nt, synthetic construct
  source 1..19: mol_type = other RNA
tagtttacataaactaagt

SEQ ID NO: 3698 - RNA, 19 nt, synthetic construct
  source 1..19: mol_type = other RNA
agtttacataaactaagtg

SEQ ID NO: 3699 - RNA, 19 nt, synthetic construct
  source 1..19: mol_type = other RNA
gtttacataaactaagtga

SEQ ID NO: 3700 - RNA, 19 nt, synthetic construct
  source 1..19: mol_type = other RNA
tttacataaactaagtgaa

SEQ ID NO: 3701 - RNA, 19 nt, synthetic construct
  source 1..19: mol_type = other RNA
ttacataaactaagtgaag

SEQ ID NO: 3702 - RNA, 19 nt, synthetic construct
  source 1..19: mol_type = other RNA
tacataaactaagtgaaga

SEQ ID NO: 3703 - RNA, 19 nt, synthetic construct
  source 1..19: mol_type = other RNA
acataaactaagtgaagag

SEQ ID NO: 3704 - RNA, 19 nt, synthetic construct
  source 1..19: mol_type = other RNA
cataaactaagtgaagagc

SEQ ID NO: 3705 - RNA, 19 nt, synthetic construct
  source 1..19: mol_type = other RNA
ataaactaagtgaagagcc

SEQ ID NO: 3706 - RNA, 19 nt, synthetic construct
  source 1..19: mol_type = other RNA
taaactaagtgaagagccc

SEQ ID NO: 3707 - RNA, 19 nt, synthetic construct
  source 1..19: mol_type = other RNA
aaactaagtgaagagcccc

SEQ ID NO: 3708 - RNA, 19 nt, synthetic construct
  source 1..19: mol_type = other RNA
aactaagtgaagagcccct

SEQ ID NO: 3709 - RNA, 19 nt, synthetic construct
  source 1..19: mol_type = other RNA
actaagtgaagagcccctg

SEQ ID NO: 3710 - RNA, 19 nt, synthetic construct
  source 1..19: mol_type = other RNA
ctaagtgaagagcccctga

SEQ ID NO: 3711 - RNA, 19 nt, synthetic construct
  source 1..19: mol_type = other RNA
taagtgaagagcccctgat

SEQ ID NO: 3712 - RNA, 19 nt, synthetic construct
  source 1..19: mol_type = other RNA
aagtgaagagcccctgatt

SEQ ID NO: 3713 - RNA, 19 nt, synthetic construct
  source 1..19: mol_type = other RNA
agtgaagagcccctgattc

SEQ ID NO: 3714 - RNA, 19 nt, synthetic construct
  source 1..19: mol_type = other RNA
gtgaagagcccctgattcc

SEQ ID NO: 3715 - RNA, 19 nt, synthetic construct
  source 1..19: mol_type = other RNA
tgaagagcccctgattcct

SEQ ID NO: 3716 - RNA, 19 nt, synthetic construct
  source 1..19: mol_type = other RNA
gaagagcccctgattcctc

SEQ ID NO: 3717 - RNA, 19 nt, synthetic construct
  source 1..19: mol_type = other RNA
aagagcccctgattcctcc

SEQ ID NO: 3718 - RNA, 19 nt, synthetic construct
  source 1..19: mol_type = other RNA
agagcccctgattcctcct

SEQ ID NO: 3719 - RNA, 19 nt, synthetic construct
  source 1..19: mol_type = other RNA
gagcccctgattcctcctc

SEQ ID NO: 3720 - RNA, 19 nt, synthetic construct
  source 1..19: mol_type = other RNA
agcccctgattcctcctcc

SEQ ID NO: 3721 - RNA, 19 nt, synthetic construct
  source 1..19: mol_type = other RNA
gcccctgattcctcctcct

SEQ ID NO: 3722 - RNA, 19 nt, synthetic construct
  source 1..19: mol_type = other RNA
cccctgattcctcctcctc

SEQ ID NO: 3723 - RNA, 19 nt, synthetic construct
  source 1..19: mol_type = other RNA
ccctgattcctcctcctct

SEQ ID NO: 3724 - RNA, 19 nt, synthetic construct
  source 1..19: mol_type = other RNA
cctgattcctcctcctctt

SEQ ID NO: 3725 - RNA, 19 nt, synthetic construct
  source 1..19: mol_type = other RNA
ctgattcctcctcctcttc

SEQ ID NO: 3726 - RNA, 19 nt, synthetic construct
  source 1..19: mol_type = other RNA
tgattcctcctcctcttcc

SEQ ID NO: 3727 - RNA, 19 nt, synthetic construct
  source 1..19: mol_type = other RNA
gattcctcctcctcttcct

SEQ ID NO: 3728 - RNA, 19 nt, synthetic construct
  source 1..19: mol_type = other RNA
attcctcctcctcttcctc

SEQ ID NO: 3729 - RNA, 19 nt, synthetic construct
  source 1..19: mol_type = other RNA
ttcctcctcctcttcctcc

SEQ ID NO: 3730 - RNA, 19 nt, synthetic construct
  source 1..19: mol_type = other RNA
tcctcctcctcttcctcct

SEQ ID NO: 3731 - RNA, 19 nt, synthetic construct
  source 1..19: mol_type = other RNA
cctcctcctcttcctcctc

SEQ ID NO: 3732 - RNA, 19 nt, synthetic construct
  source 1..19: mol_type = other RNA
ctcctcctcttcctcctcg

SEQ ID NO: 3733 - RNA, 19 nt, synthetic construct
  source 1..19: mol_type = other RNA
tcctcctcttcctcctcga

SEQ ID NO: 3734 - RNA, 19 nt, synthetic construct
  source 1..19: mol_type = other RNA
cctcctcttcctcctcgaa

SEQ ID NO: 3735 - RNA, 19 nt, synthetic construct
  source 1..19: mol_type = other RNA
ctcctcttcctcctcgaaa

SEQ ID NO: 3736 - RNA, 19 nt, synthetic construct
  source 1..19: mol_type = other RNA
tcctcttcctcctcgaaaa

SEQ ID NO: 3737 - RNA, 19 nt, synthetic construct
  source 1..19: mol_type = other RNA
cctcttcctcctcgaaaaa

SEQ ID NO: 3738 - RNA, 19 nt, synthetic construct
  source 1..19: mol_type = other RNA
ctcttcctcctcgaaaaaa

SEQ ID NO: 3739 - RNA, 19 nt, synthetic construct
  source 1..19: mol_type = other RNA
tcttcctcctcgaaaaaag

SEQ ID NO: 3740 - RNA, 19 nt, synthetic construct
  source 1..19: mol_type = other RNA
cttcctcctcgaaaaaagt

SEQ ID NO: 3741 - RNA, 19 nt, synthetic construct
  source 1..19: mol_type = other RNA
ttcctcctcgaaaaaagtt

SEQ ID NO: 3742 - RNA, 19 nt, synthetic construct
  source 1..19: mol_type = other RNA
tcctcctcgaaaaaagttt

SEQ ID NO: 3743 - RNA, 19 nt, synthetic construct
  source 1..19: mol_type = other RNA
cctcctcgaaaaaagtttg

SEQ ID NO: 3744 - RNA, 19 nt, synthetic construct
  source 1..19: mol_type = other RNA
ctcctcgaaaaaagtttga

SEQ ID NO: 3745 - RNA, 19 nt, synthetic construct
  source 1..19: mol_type = other RNA
tcctcgaaaaaagtttgat

SEQ ID NO: 3746 - RNA, 19 nt, synthetic construct
  source 1..19: mol_type = other RNA
cctcgaaaaaagtttgatc

SEQ ID NO: 3747 - RNA, 19 nt, synthetic construct
  source 1..19: mol_type = other RNA
ctcgaaaaaagtttgatca

SEQ ID NO: 3748 - RNA, 19 nt, synthetic construct
  source 1..19: mol_type = other RNA
tcgaaaaaagtttgatcat

SEQ ID NO: 3749 - RNA, 19 nt, synthetic construct
  source 1..19: mol_type = other RNA
cgaaaaaagtttgatcatg

SEQ ID NO: 3750 - RNA, 19 nt, synthetic construct
  source 1..19: mol_type = other RNA
gaaaaaagtttgatcatga

SEQ ID NO: 3751 - RNA, 19 nt, synthetic construct
  source 1..19: mol_type = other RNA
aaaaaagtttgatcatgat

SEQ ID NO: 3752 - RNA, 19 nt, synthetic construct
  source 1..19: mol_type = other RNA
aaaaagtttgatcatgatg

SEQ ID NO: 3753 - RNA, 19 nt, synthetic construct
  source 1..19: mol_type = other RNA
aaaagtttgatcatgatgc

SEQ ID NO: 3754 - RNA, 19 nt, synthetic construct
  source 1..19: mol_type = other RNA
aaagtttgatcatgatgct

SEQ ID NO: 3755 - RNA, 19 nt, synthetic construct
  source 1..19: mol_type = other RNA
aagtttgatcatgatgctt

SEQ ID NO: 3756 - RNA, 19 nt, synthetic construct
  source 1..19: mol_type = other RNA
agtttgatcatgatgcttc

SEQ ID NO: 3757 - RNA, 19 nt, synthetic construct
  source 1..19: mol_type = other RNA
gtttgatcatgatgcttca

SEQ ID NO: 3758 - RNA, 19 nt, synthetic construct
  source 1..19: mol_type = other RNA
tttgatcatgatgcttcaa

SEQ ID NO: 3759 - RNA, 19 nt, synthetic construct
  source 1..19: mol_type = other RNA
ttgatcatgatgcttcaaa

SEQ ID NO: 3760 - RNA, 19 nt, synthetic construct
  source 1..19: mol_type = other RNA
tgatcatgatgcttcaaat

SEQ ID NO: 3761 - RNA, 19 nt, synthetic construct
  source 1..19: mol_type = other RNA
gatcatgatgcttcaaatt

SEQ ID NO: 3762 - RNA, 19 nt, synthetic construct
  source 1..19: mol_type = other RNA
atcatgatgcttcaaattc

SEQ ID NO: 3763 - RNA, 19 nt, synthetic construct
  source 1..19: mol_type = other RNA
tcatgatgcttcaaattcc

SEQ ID NO: 3764 - RNA, 19 nt, synthetic construct
  source 1..19: mol_type = other RNA
catgatgcttcaaattcca

SEQ ID NO: 3765 - RNA, 19 nt, synthetic construct
  source 1..19: mol_type = other RNA
atgatgcttcaaattccaa

SEQ ID NO: 3766 - RNA, 19 nt, synthetic construct
  source 1..19: mol_type = other RNA
tgatgcttcaaattccaag

SEQ ID NO: 3767 - RNA, 19 nt, synthetic construct
  source 1..19: mol_type = other RNA
gatgcttcaaattccaagg

SEQ ID NO: 3768 - RNA, 19 nt, synthetic construct
  source 1..19: mol_type = other RNA
atgcttcaaattccaaggg

SEQ ID NO: 3769 - RNA, 19 nt, synthetic construct
  source 1..19: mol_type = other RNA
tgcttcaaattccaaggga

SEQ ID NO: 3770 - RNA, 19 nt, synthetic construct
  source 1..19: mol_type = other RNA
gcttcaaattccaagggaa

SEQ ID NO: 3771 - RNA, 19 nt, synthetic construct
  source 1..19: mol_type = other RNA
cttcaaattccaagggaaa

SEQ ID NO: 3772 - RNA, 19 nt, synthetic construct
  source 1..19: mol_type = other RNA
ttcaaattccaagggaaat

SEQ ID NO: 3773 - RNA, 19 nt, synthetic construct
  source 1..19: mol_type = other RNA
tcaaattccaagggaaata

SEQ ID NO: 3774 - RNA, 19 nt, synthetic construct
  source 1..19: mol_type = other RNA
caaattccaagggaaatat

SEQ ID NO: 3775 - RNA, 19 nt, synthetic construct
  source 1..19: mol_type = other RNA
aaattccaagggaaatatg

SEQ ID NO: 3776 - RNA, 19 nt, synthetic construct
  source 1..19: mol_type = other RNA
aattccaagggaaatatga

SEQ ID NO: 3777 - RNA, 19 nt, synthetic construct
  source 1..19: mol_type = other RNA
attccaagggaaatatgaa

SEQ ID NO: 3778 - RNA, 19 nt, synthetic construct
  source 1..19: mol_type = other RNA
ttccaagggaaatatgaaa

SEQ ID NO: 3779 - RNA, 19 nt, synthetic construct
  source 1..19: mol_type = other RNA
tccaagggaaatatgaaat

SEQ ID NO: 3780 - RNA, 19 nt, synthetic construct
  source 1..19: mol_type = other RNA
ccaagggaaatatgaaatc

SEQ ID NO: 3781 - RNA, 19 nt, synthetic construct
  source 1..19: mol_type = other RNA
caagggaaatatgaaatct

SEQ ID NO: 3782 - RNA, 19 nt, synthetic construct
  source 1..19: mol_type = other RNA
aagggaaatatgaaatctg

SEQ ID NO: 3783 - RNA, 19 nt, synthetic construct
  source 1..19: mol_type = other RNA
agggaaatatgaaatctga

SEQ ID NO: 3784 - RNA, 19 nt, synthetic construct
  source 1..19: mol_type = other RNA
gggaaatatgaaatctgat

SEQ ID NO: 3785 - RNA, 19 nt, synthetic construct
  source 1..19: mol_type = other RNA
ggaaatatgaaatctgatg

SEQ ID NO: 3786 - RNA, 19 nt, synthetic construct
  source 1..19: mol_type = other RNA
gaaatatgaaatctgatga

SEQ ID NO: 3787 - RNA, 19 nt, synthetic construct
  source 1..19: mol_type = other RNA
aaatatgaaatctgatgat

SEQ ID NO: 3788 - RNA, 19 nt, synthetic construct
  source 1..19: mol_type = other RNA
aatatgaaatctgatgatg

SEQ ID NO: 3789 - RNA, 19 nt, synthetic construct
  source 1..19: mol_type = other RNA
atatgaaatctgatgatga

SEQ ID NO: 3790 - RNA, 19 nt, synthetic construct
  source 1..19: mol_type = other RNA
tatgaaatctgatgatgat

SEQ ID NO: 3791 - RNA, 19 nt, synthetic construct
  source 1..19: mol_type = other RNA
atgaaatctgatgatgatc

SEQ ID NO: 3792 - RNA, 19 nt, synthetic construct
  source 1..19: mol_type = other RNA
tgaaatctgatgatgatcc

SEQ ID NO: 3793 - RNA, 19 nt, synthetic construct
  source 1..19: mol_type = other RNA
gaaatctgatgatgatcct

SEQ ID NO: 3794 - RNA, 19 nt, synthetic construct
  source 1..19: mol_type = other RNA
aaatctgatgatgatcctc

SEQ ID NO: 3795 - RNA, 19 nt, synthetic construct
  source 1..19: mol_type = other RNA
aatctgatgatgatcctcc

SEQ ID NO: 3796 - RNA, 19 nt, synthetic construct
  source 1..19: mol_type = other RNA
atctgatgatgatcctcct

SEQ ID NO: 3797 - RNA, 19 nt, synthetic construct
  source 1..19: mol_type = other RNA
tctgatgatgatcctcctg

SEQ ID NO: 3798 - RNA, 19 nt, synthetic construct
  source 1..19: mol_type = other RNA
ctgatgatgatcctcctgc

SEQ ID NO: 3799 - RNA, 19 nt, synthetic construct
  source 1..19: mol_type = other RNA
tgatgatgatcctcctgct

SEQ ID NO: 3800 - RNA, 19 nt, synthetic construct
  source 1..19: mol_type = other RNA
gatgatgatcctcctgcta

SEQ ID NO: 3801 - RNA, 19 nt, synthetic construct
  source 1..19: mol_type = other RNA
atgatgatcctcctgctat

SEQ ID NO: 3802 - RNA, 19 nt, synthetic construct
  source 1..19: mol_type = other RNA
tgatgatcctcctgctatt

SEQ ID NO: 3803 - RNA, 19 nt, synthetic construct
  source 1..19: mol_type = other RNA
gatgatcctcctgctattc

SEQ ID NO: 3804 - RNA, 19 nt, synthetic construct
  source 1..19: mol_type = other RNA
atgatcctcctgctattcc

SEQ ID NO: 3805 - RNA, 19 nt, synthetic construct
  source 1..19: mol_type = other RNA
tgatcctcctgctattcca

SEQ ID NO: 3806 - RNA, 19 nt, synthetic construct
  source 1..19: mol_type = other RNA
gatcctcctgctattccac

SEQ ID NO: 3807 - RNA, 19 nt, synthetic construct
  source 1..19: mol_type = other RNA
atcctcctgctattccacc

SEQ ID NO: 3808 - RNA, 19 nt, synthetic construct
  source 1..19: mol_type = other RNA
tcctcctgctattccaccg

SEQ ID NO: 3809 - RNA, 19 nt, synthetic construct
  source 1..19: mol_type = other RNA
cctcctgctattccaccga

SEQ ID NO: 3810 - RNA, 19 nt, synthetic construct
  source 1..19: mol_type = other RNA
ctcctgctattccaccgag

SEQ ID NO: 3811 - RNA, 19 nt, synthetic construct
  source 1..19: mol_type = other RNA
tcctgctattccaccgaga

SEQ ID NO: 3812 - RNA, 19 nt, synthetic construct
  source 1..19: mol_type = other RNA
cctgctattccaccgagac

SEQ ID NO: 3813 - RNA, 19 nt, synthetic construct
  source 1..19: mol_type = other RNA
ctgctattccaccgagaca

SEQ ID NO: 3814 - RNA, 19 nt, synthetic construct
  source 1..19: mol_type = other RNA
tgctattccaccgagacag

SEQ ID NO: 3815 - RNA, 19 nt, synthetic construct
  source 1..19: mol_type = other RNA
gctattccaccgagacagc

SEQ ID NO: 3816 - RNA, 19 nt, synthetic construct
  source 1..19: mol_type = other RNA
ctattccaccgagacagcc

SEQ ID NO: 3817 - RNA, 19 nt, synthetic construct
  source 1..19: mol_type = other RNA
tattccaccgagacagcct

SEQ ID NO: 3818 - RNA, 19 nt, synthetic construct
  source 1..19: mol_type = other RNA
attccaccgagacagcctc

SEQ ID NO: 3819 - RNA, 19 nt, synthetic construct
  source 1..19: mol_type = other RNA
ttccaccgagacagcctcc

SEQ ID NO: 3820 - RNA, 19 nt, synthetic construct
  source 1..19: mol_type = other RNA
tccaccgagacagcctcct

SEQ ID NO: 3821 - RNA, 19 nt, synthetic construct
  source 1..19: mol_type = other RNA
ccaccgagacagcctcctc

SEQ ID NO: 3822 - RNA, 19 nt, synthetic construct
  source 1..19: mol_type = other RNA
caccgagacagcctcctcc

SEQ ID NO: 3823 - RNA, 19 nt, synthetic construct
  source 1..19: mol_type = other RNA
accgagacagcctcctcct

SEQ ID NO: 3824 - RNA, 19 nt, synthetic construct
  source 1..19: mol_type = other RNA
ccgagacagcctcctcctc

SEQ ID NO: 3825 - RNA, 19 nt, synthetic construct
  source 1..19: mol_type = other RNA
cgagacagcctcctcctcc

SEQ ID NO: 3826 - RNA, 19 nt, synthetic construct
  source 1..19: mol_type = other RNA
gagacagcctcctcctcca

SEQ ID NO: 3827 - RNA, 19 nt, synthetic construct
  source 1..19: mol_type = other RNA
agacagcctcctcctccaa

SEQ ID NO: 3828 - RNA, 19 nt, synthetic construct
  source 1..19: mol_type = other RNA
gacagcctcctcctccaaa

SEQ ID NO: 3829 - RNA, 19 nt, synthetic construct
  source 1..19: mol_type = other RNA
acagcctcctcctccaaag

SEQ ID NO: 3830 - RNA, 19 nt, synthetic construct
  source 1..19: mol_type = other RNA
cagcctcctcctccaaagg

SEQ ID NO: 3831 - RNA, 19 nt, synthetic construct
  source 1..19: mol_type = other RNA
agcctcctcctccaaaggt

SEQ ID NO: 3832 - RNA, 19 nt, synthetic construct
  source 1..19: mol_type = other RNA
gcctcctcctccaaaggta

SEQ ID NO: 3833 - RNA, 19 nt, synthetic construct
  source 1..19: mol_type = other RNA
cctcctcctccaaaggtaa

SEQ ID NO: 3834 - RNA, 19 nt, synthetic construct
  source 1..19: mol_type = other RNA
ctcctcctccaaaggtaaa

SEQ ID NO: 3835 - RNA, 19 nt, synthetic construct
  source 1..19: mol_type = other RNA
tcctcctccaaaggtaaaa

SEQ ID NO: 3836 - RNA, 19 nt, synthetic construct
  source 1..19: mol_type = other RNA
cctcctccaaaggtaaaac

SEQ ID NO: 3837 - RNA, 19 nt, synthetic construct
  source 1..19: mol_type = other RNA
ctcctccaaaggtaaaacc

SEQ ID NO: 3838 - RNA, 19 nt, synthetic construct
  source 1..19: mol_type = other RNA
tcctccaaaggtaaaaccc

SEQ ID NO: 3839 - RNA, 19 nt, synthetic construct
  source 1..19: mol_type = other RNA
cctccaaaggtaaaaccca

SEQ ID NO: 3840 - RNA, 19 nt, synthetic construct
  source 1..19: mol_type = other RNA
ctccaaaggtaaaacccag

SEQ ID NO: 3841 - RNA, 19 nt, synthetic construct
  source 1..19: mol_type = other RNA
tccaaaggtaaaacccaga

SEQ ID NO: 3842 - RNA, 19 nt, synthetic construct
  source 1..19: mol_type = other RNA
ccaaaggtaaaacccagag

SEQ ID NO: 3843 - RNA, 19 nt, synthetic construct
  source 1..19: mol_type = other RNA
caaaggtaaaacccagagt

SEQ ID NO: 3844 - RNA, 19 nt, synthetic construct
  source 1..19: mol_type = other RNA
aaaggtaaaacccagagtt

SEQ ID NO: 3845 - RNA, 19 nt, synthetic construct
  source 1..19: mol_type = other RNA
aaggtaaaacccagagttc

SEQ ID NO: 3846 - RNA, 19 nt, synthetic construct
  source 1..19: mol_type = other RNA
aggtaaaacccagagttcc

SEQ ID NO: 3847 - RNA, 19 nt, synthetic construct
  source 1..19: mol_type = other RNA
ggtaaaacccagagttcct

SEQ ID NO: 3848 - RNA, 19 nt, synthetic construct
  source 1..19: mol_type = other RNA
gtaaaacccagagttcctg

SEQ ID NO: 3849 - RNA, 19 nt, synthetic construct
  source 1..19: mol_type = other RNA
taaaacccagagttcctgt

SEQ ID NO: 3850 - RNA, 19 nt, synthetic construct
  source 1..19: mol_type = other RNA
aaaacccagagttcctgtt

SEQ ID NO: 3851 - RNA, 19 nt, synthetic construct
  source 1..19: mol_type = other RNA
aaacccagagttcctgttc

SEQ ID NO: 3852 - RNA, 19 nt, synthetic construct
  source 1..19: mol_type = other RNA
aacccagagttcctgttcc

SEQ ID NO: 3853 - RNA, 19 nt, synthetic construct
  source 1..19: mol_type = other RNA
acccagagttcctgttcct

SEQ ID NO: 3854 - RNA, 19 nt, synthetic construct
  source 1..19: mol_type = other RNA
cccagagttcctgttccta

SEQ ID NO: 3855 - RNA, 19 nt, synthetic construct
  source 1..19: mol_type = other RNA
ccagagttcctgttcctac

SEQ ID NO: 3856 - RNA, 19 nt, synthetic construct
  source 1..19: mol_type = other RNA
cagagttcctgttcctact

SEQ ID NO: 3857 - RNA, 19 nt, synthetic construct
  source 1..19: mol_type = other RNA
agagttcctgttcctactg

SEQ ID NO: 3858 - RNA, 19 nt, synthetic construct
  source 1..19: mol_type = other RNA
gagttcctgttcctactgg

SEQ ID NO: 3859 - RNA, 19 nt, synthetic construct
  source 1..19: mol_type = other RNA
agttcctgttcctactggt

SEQ ID NO: 3860 - RNA, 19 nt, synthetic construct
  source 1..19: mol_type = other RNA
gttcctgttcctactggtg

SEQ ID NO: 3861 - RNA, 19 nt, synthetic construct
  source 1..19: mol_type = other RNA
ttcctgttcctactggtgc

SEQ ID NO: 3862 - RNA, 19 nt, synthetic construct
  source 1..19: mol_type = other RNA
tcctgttcctactggtgca

SEQ ID NO: 3863 - RNA, 19 nt, synthetic construct
  source 1..19: mol_type = other RNA
cctgttcctactggtgcat

SEQ ID NO: 3864 - RNA, 19 nt, synthetic construct
  source 1..19: mol_type = other RNA
ctgttcctactggtgcatt

SEQ ID NO: 3865 - RNA, 19 nt, synthetic construct
  source 1..19: mol_type = other RNA
tgttcctactggtgcattt

SEQ ID NO: 3866 - RNA, 19 nt, synthetic construct
  source 1..19: mol_type = other RNA
gttcctactggtgcatttg

SEQ ID NO: 3867 - RNA, 19 nt, synthetic construct
  source 1..19: mol_type = other RNA
ttcctactggtgcatttga

SEQ ID NO: 3868 - RNA, 19 nt, synthetic construct
  source 1..19: mol_type = other RNA
tcctactggtgcatttgat

SEQ ID NO: 3869 - RNA, 19 nt, synthetic construct
  source 1..19: mol_type = other RNA
cctactggtgcatttgatg

SEQ ID NO: 3870 - RNA, 19 nt, synthetic construct
  source 1..19: mol_type = other RNA
ctactggtgcatttgatgg

SEQ ID NO: 3871 - RNA, 19 nt, synthetic construct
  source 1..19: mol_type = other RNA
tactggtgcatttgatggg

SEQ ID NO: 3872 - RNA, 19 nt, synthetic construct
  source 1..19: mol_type = other RNA
actggtgcatttgatgggc

SEQ ID NO: 3873 - RNA, 19 nt, synthetic construct
  source 1..19: mol_type = other RNA
ctggtgcatttgatgggcc

SEQ ID NO: 3874 - RNA, 19 nt, synthetic construct
  source 1..19: mol_type = other RNA
tggtgcatttgatgggcct

SEQ ID NO: 3875 - RNA, 19 nt, synthetic construct
  source 1..19: mol_type = other RNA
ggtgcatttgatgggcctc

SEQ ID NO: 3876 - RNA, 19 nt, synthetic construct
  source 1..19: mol_type = other RNA
gtgcatttgatgggcctct

SEQ ID NO: 3877 - RNA, 19 nt, synthetic construct
  source 1..19: mol_type = other RNA
tgcatttgatgggcctctg

SEQ ID NO: 3878 - RNA, 19 nt, synthetic construct
  source 1..19: mol_type = other RNA
gcatttgatgggcctctgc

SEQ ID NO: 3879 - RNA, 19 nt, synthetic construct
  source 1..19: mol_type = other RNA
catttgatgggcctctgca

SEQ ID NO: 3880 - RNA, 19 nt, synthetic construct
  source 1..19: mol_type = other RNA
atttgatgggcctctgcat

SEQ ID NO: 3881 - RNA, 19 nt, synthetic construct
  source 1..19: mol_type = other RNA
tttgatgggcctctgcata

SEQ ID NO: 3882 - RNA, 19 nt, synthetic construct
  source 1..19: mol_type = other RNA
ttgatgggcctctgcatag

SEQ ID NO: 3883 - RNA, 19 nt, synthetic construct
  source 1..19: mol_type = other RNA
tgatgggcctctgcatagt

SEQ ID NO: 3884 - RNA, 19 nt, synthetic construct
  source 1..19: mol_type = other RNA
gatgggcctctgcatagtc

SEQ ID NO: 3885 - RNA, 19 nt, synthetic construct
  source 1..19: mol_type = other RNA
atgggcctctgcatagtcc

SEQ ID NO: 3886 - RNA, 19 nt, synthetic construct
  source 1..19: mol_type = other RNA
tgggcctctgcatagtcca

SEQ ID NO: 3887 - RNA, 19 nt, synthetic construct
  source 1..19: mol_type = other RNA
gggcctctgcatagtccac

SEQ ID NO: 3888 - RNA, 19 nt, synthetic construct
  source 1..19: mol_type = other RNA
ggcctctgcatagtccacc

SEQ ID NO: 3889 - RNA, 19 nt, synthetic construct
  source 1..19: mol_type = other RNA
gcctctgcatagtccacct

SEQ ID NO: 3890 - RNA, 19 nt, synthetic construct
  source 1..19: mol_type = other RNA
cctctgcatagtccacctc

SEQ ID NO: 3891 - RNA, 19 nt, synthetic construct
  source 1..19: mol_type = other RNA
ctctgcatagtccacctcc

SEQ ID NO: 3892 - RNA, 19 nt, synthetic construct
  source 1..19: mol_type = other RNA
tctgcatagtccacctccg

SEQ ID NO: 3893 - RNA, 19 nt, synthetic construct
  source 1..19: mol_type = other RNA
ctgcatagtccacctccgc

SEQ ID NO: 3894 - RNA, 19 nt, synthetic construct
  source 1..19: mol_type = other RNA
tgcatagtccacctccgcc

SEQ ID NO: 3895 - RNA, 19 nt, synthetic construct
  source 1..19: mol_type = other RNA
gcatagtccacctccgcca

SEQ ID NO: 3896 - RNA, 19 nt, synthetic construct
  source 1..19: mol_type = other RNA
catagtccacctccgccac

SEQ ID NO: 3897 - RNA, 19 nt, synthetic construct
  source 1..19: mol_type = other RNA
atagtccacctccgccacc

SEQ ID NO: 3898 - RNA, 19 nt, synthetic construct
  source 1..19: mol_type = other RNA
tagtccacctccgccacca

SEQ ID NO: 3899 - RNA, 19 nt, synthetic construct
  source 1..19: mol_type = other RNA
agtccacctccgccaccac

SEQ ID NO: 3900 - RNA, 19 nt, synthetic construct
  source 1..19: mol_type = other RNA
gtccacctccgccaccacc

SEQ ID NO: 3901 - RNA, 19 nt, synthetic construct
  source 1..19: mol_type = other RNA
tccacctccgccaccacca

SEQ ID NO: 3902 - RNA, 19 nt, synthetic construct
  source 1..19: mol_type = other RNA
ccacctccgccaccaccaa

SEQ ID NO: 3903 - RNA, 19 nt, synthetic construct
  source 1..19: mol_type = other RNA
cacctccgccaccaccaag

SEQ ID NO: 3904 - RNA, 19 nt, synthetic construct
  source 1..19: mol_type = other RNA
acctccgccaccaccaaga

SEQ ID NO: 3905 - RNA, 19 nt, synthetic construct
  source 1..19: mol_type = other RNA
cctccgccaccaccaagag

SEQ ID NO: 3906 - RNA, 19 nt, synthetic construct
  source 1..19: mol_type = other RNA
ctccgccaccaccaagaga

SEQ ID NO: 3907 - RNA, 19 nt, synthetic construct
  source 1..19: mol_type = other RNA
tccgccaccaccaagagat

SEQ ID NO: 3908 - RNA, 19 nt, synthetic construct
  source 1..19: mol_type = other RNA
ccgccaccaccaagagatc

SEQ ID NO: 3909 - RNA, 19 nt, synthetic construct
  source 1..19: mol_type = other RNA
cgccaccaccaagagatcc

SEQ ID NO: 3910 - RNA, 19 nt, synthetic construct
  source 1..19: mol_type = other RNA
gccaccaccaagagatcct

SEQ ID NO: 3911 - RNA, 19 nt, synthetic construct
  source 1..19: mol_type = other RNA
ccaccaccaagagatcctc

SEQ ID NO: 3912 - RNA, 19 nt, synthetic construct
  source 1..19: mol_type = other RNA
caccaccaagagatcctct

SEQ ID NO: 3913 - RNA, 19 nt, synthetic construct
  source 1..19: mol_type = other RNA
accaccaagagatcctctt

SEQ ID NO: 3914 - RNA, 19 nt, synthetic construct
  source 1..19: mol_type = other RNA
ccaccaagagatcctcttc

SEQ ID NO: 3915 - RNA, 19 nt, synthetic construct
  source 1..19: mol_type = other RNA
caccaagagatcctcttcc

SEQ ID NO: 3916 - RNA, 19 nt, synthetic construct
  source 1..19: mol_type = other RNA
accaagagatcctcttcct

SEQ ID NO: 3917 - RNA, 19 nt, synthetic construct
  source 1..19: mol_type = other RNA
ccaagagatcctcttcctg

SEQ ID NO: 3918 - RNA, 19 nt, synthetic construct
  source 1..19: mol_type = other RNA
caagagatcctcttcctga

SEQ ID NO: 3919 - RNA, 19 nt, synthetic construct
  source 1..19: mol_type = other RNA
aagagatcctcttcctgat

SEQ ID NO: 3920 - RNA, 19 nt, synthetic construct
  source 1..19: mol_type = other RNA
agagatcctcttcctgata

SEQ ID NO: 3921 - RNA, 19 nt, synthetic construct
  source 1..19: mol_type = other RNA
gagatcctcttcctgatac

SEQ ID NO: 3922 - RNA, 19 nt, synthetic construct
  source 1..19: mol_type = other RNA
agatcctcttcctgatacc

SEQ ID NO: 3923 - RNA, 19 nt, synthetic construct
  source 1..19: mol_type = other RNA
gatcctcttcctgataccc

SEQ ID NO: 3924 - RNA, 19 nt, synthetic construct
  source 1..19: mol_type = other RNA
atcctcttcctgatacccc

SEQ ID NO: 3925 - RNA, 19 nt, synthetic construct
  source 1..19: mol_type = other RNA
tcctcttcctgatacccct

SEQ ID NO: 3926 - RNA, 19 nt, synthetic construct
  source 1..19: mol_type = other RNA
cctcttcctgatacccctc

SEQ ID NO: 3927 - RNA, 19 nt, synthetic construct
  source 1..19: mol_type = other RNA
ctcttcctgatacccctcc

SEQ ID NO: 3928 - RNA, 19 nt, synthetic construct
  source 1..19: mol_type = other RNA
tcttcctgatacccctcca

SEQ ID NO: 3929 - RNA, 19 nt, synthetic construct
  source 1..19: mol_type = other RNA
cttcctgatacccctccac

SEQ ID NO: 3930 - RNA, 19 nt, synthetic construct
  source 1..19: mol_type = other RNA
ttcctgatacccctccacc

SEQ ID NO: 3931 - RNA, 19 nt, synthetic construct
  source 1..19: mol_type = other RNA
tcctgatacccctccacca

SEQ ID NO: 3932 - RNA, 19 nt, synthetic construct
  source 1..19: mol_type = other RNA
cctgatacccctccaccag

SEQ ID NO: 3933 - RNA, 19 nt, synthetic construct
  source 1..19: mol_type = other RNA
ctgatacccctccaccagt

SEQ ID NO: 3934 - RNA, 19 nt, synthetic construct
  source 1..19: mol_type = other RNA
tgatacccctccaccagtt

SEQ ID NO: 3935 - RNA, 19 nt, synthetic construct
  source 1..19: mol_type = other RNA
gatacccctccaccagttc

SEQ ID NO: 3936 - RNA, 19 nt, synthetic construct
  source 1..19: mol_type = other RNA
atacccctccaccagttcc

SEQ ID NO: 3937 - RNA, 19 nt, synthetic construct
  source 1..19: mol_type = other RNA
tacccctccaccagttccc

SEQ ID NO: 3938 - RNA, 19 nt, synthetic construct
  source 1..19: mol_type = other RNA
acccctccaccagttcccc

SEQ ID NO: 3939 - RNA, 19 nt, synthetic construct
  source 1..19: mol_type = other RNA
cccctccaccagttcccct

SEQ ID NO: 3940 - RNA, 19 nt, synthetic construct
  source 1..19: mol_type = other RNA
ccctccaccagttcccctt

SEQ ID NO: 3941 - RNA, 19 nt, synthetic construct
  source 1..19: mol_type = other RNA
cctccaccagttccccttc

SEQ ID NO: 3942 - RNA, 19 nt, synthetic construct
  source 1..19: mol_type = other RNA
ctccaccagttccccttcg

SEQ ID NO: 3943 - RNA, 19 nt, synthetic construct
  source 1..19: mol_type = other RNA
tccaccagttccccttcgg

SEQ ID NO: 3944 - RNA, 19 nt, synthetic construct
  source 1..19: mol_type = other RNA
ccaccagttccccttcggc

SEQ ID NO: 3945 - RNA, 19 nt, synthetic construct
  source 1..19: mol_type = other RNA
caccagttccccttcggcc

SEQ ID NO: 3946 - RNA, 19 nt, synthetic construct
  source 1..19: mol_type = other RNA
accagttccccttcggcct

SEQ ID NO: 3947 - RNA, 19 nt, synthetic construct
  source 1..19: mol_type = other RNA
ccagttccccttcggcctc

SEQ ID NO: 3948 - RNA, 19 nt, synthetic construct
  source 1..19: mol_type = other RNA
cagttccccttcggcctcc

SEQ ID NO: 3949 - RNA, 19 nt, synthetic construct
  source 1..19: mol_type = other RNA
agttccccttcggcctcca

SEQ ID NO: 3950 - RNA, 19 nt, synthetic construct
  source 1..19: mol_type = other RNA
gttccccttcggcctccag

SEQ ID NO: 3951 - RNA, 19 nt, synthetic construct
  source 1..19: mol_type = other RNA
ttccccttcggcctccaga

SEQ ID NO: 3952 - RNA, 19 nt, synthetic construct
  source 1..19: mol_type = other RNA
tccccttcggcctccagaa

SEQ ID NO: 3953 - RNA, 19 nt, synthetic construct
  source 1..19: mol_type = other RNA
ccccttcggcctccagaac

SEQ ID NO: 3954 - RNA, 19 nt, synthetic construct
  source 1..19: mol_type = other RNA
cccttcggcctccagaaca

SEQ ID NO: 3955 - RNA, 19 nt, synthetic construct
  source 1..19: mol_type = other RNA
ccttcggcctccagaacac

SEQ ID NO: 3956 - RNA, 19 nt, synthetic construct
  source 1..19: mol_type = other RNA
cttcggcctccagaacact

SEQ ID NO: 3957 - RNA, 19 nt, synthetic construct
  source 1..19: mol_type = other RNA
ttcggcctccagaacactt

SEQ ID NO: 3958 - RNA, 19 nt, synthetic construct
  source 1..19: mol_type = other RNA
tcggcctccagaacacttt

SEQ ID NO: 3959 - RNA, 19 nt, synthetic construct
  source 1..19: mol_type = other RNA
cggcctccagaacacttta

SEQ ID NO: 3960 - RNA, 19 nt, synthetic construct
  source 1..19: mol_type = other RNA
ggcctccagaacactttat

SEQ ID NO: 3961 - RNA, 19 nt, synthetic construct
  source 1..19: mol_type = other RNA
gcctccagaacactttata

SEQ ID NO: 3962 - RNA, 19 nt, synthetic construct
  source 1..19: mol_type = other RNA
cctccagaacactttataa

SEQ ID NO: 3963 - RNA, 19 nt, synthetic construct
  source 1..19: mol_type = other RNA
ctccagaacactttataaa

SEQ ID NO: 3964 - RNA, 19 nt, synthetic construct
  source 1..19: mol_type = other RNA
tccagaacactttataaac

SEQ ID NO: 3965 - RNA, 19 nt, synthetic construct
  source 1..19: mol_type = other RNA
ccagaacactttataaact

SEQ ID NO: 3966 - RNA, 19 nt, synthetic construct
  source 1..19: mol_type = other RNA
cagaacactttataaactg

SEQ ID NO: 3967 - RNA, 19 nt, synthetic construct
  source 1..19: mol_type = other RNA
agaacactttataaactgt

SEQ ID NO: 3968 - RNA, 19 nt, synthetic construct
  source 1..19: mol_type = other RNA
gaacactttataaactgtc

SEQ ID NO: 3969 - RNA, 19 nt, synthetic construct
  source 1..19: mol_type = other RNA
aacactttataaactgtcc

SEQ ID NO: 3970 - RNA, 19 nt, synthetic construct
  source 1..19: mol_type = other RNA
acactttataaactgtcca

SEQ ID NO: 3971 - RNA, 19 nt, synthetic construct
  source 1..19: mol_type = other RNA
cactttataaactgtccat

SEQ ID NO: 3972 - RNA, 19 nt, synthetic construct
  source 1..19: mol_type = other RNA
actttataaactgtccatt

SEQ ID NO: 3973 - RNA, 19 nt, synthetic construct
  source 1..19: mol_type = other RNA
ctttataaactgtccattt

SEQ ID NO: 3974 - RNA, 19 nt, synthetic construct
  source 1..19: mol_type = other RNA
tttataaactgtccattta

SEQ ID NO: 3975 - RNA, 19 nt, synthetic construct
  source 1..19: mol_type = other RNA
ttataaactgtccatttaa

SEQ ID NO: 3976 - RNA, 19 nt, synthetic construct
  source 1..19: mol_type = other RNA
tataaactgtccatttaat

SEQ ID NO: 3977 - RNA, 19 nt, synthetic construct
  source 1..19: mol_type = other RNA
ataaactgtccatttaatc

SEQ ID NO: 3978 - RNA, 19 nt, synthetic construct
  source 1..19: mol_type = other RNA
taaactgtccatttaatct

SEQ ID NO: 3979 - RNA, 19 nt, synthetic construct
  source 1..19: mol_type = other RNA
aaactgtccatttaatctt

SEQ ID NO: 3980 - RNA, 19 nt, synthetic construct
  source 1..19: mol_type = other RNA
aactgtccatttaatcttc

SEQ ID NO: 3981 - RNA, 19 nt, synthetic construct
  source 1..19: mol_type = other RNA
actgtccatttaatcttca

SEQ ID NO: 3982 - RNA, 19 nt, synthetic construct
  source 1..19: mol_type = other RNA
ctgtccatttaatcttcag

SEQ ID NO: 3983 - RNA, 19 nt, synthetic construct
  source 1..19: mol_type = other RNA
tgtccatttaatcttcagc

SEQ ID NO: 3984 - RNA, 19 nt, synthetic construct
  source 1..19: mol_type = other RNA
gtccatttaatcttcagcc

SEQ ID NO: 3985 - RNA, 19 nt, synthetic construct
  source 1..19: mol_type = other RNA
tccatttaatcttcagcca

SEQ ID NO: 3986 - RNA, 19 nt, synthetic construct
  source 1..19: mol_type = other RNA
ccatttaatcttcagccac

SEQ ID NO: 3987 - RNA, 19 nt, synthetic construct
  source 1..19: mol_type = other RNA
catttaatcttcagccacc

SEQ ID NO: 3988 - RNA, 19 nt, synthetic construct
  source 1..19: mol_type = other RNA
atttaatcttcagccacct

SEQ ID NO: 3989 - RNA, 19 nt, synthetic construct
  source 1..19: mol_type = other RNA
tttaatcttcagccacctc

SEQ ID NO: 3990 - RNA, 19 nt, synthetic construct
  source 1..19: mol_type = other RNA
ttaatcttcagccacctcc

SEQ ID NO: 3991 - RNA, 19 nt, synthetic construct
  source 1..19: mol_type = other RNA
taatcttcagccacctcca

SEQ ID NO: 3992 - RNA, 19 nt, synthetic construct
  source 1..19: mol_type = other RNA
aatcttcagccacctccac

SEQ ID NO: 3993 - RNA, 19 nt, synthetic construct
  source 1..19: mol_type = other RNA
atcttcagccacctccact

SEQ ID NO: 3994 - RNA, 19 nt, synthetic construct
  source 1..19: mol_type = other RNA
tcttcagccacctccactg

SEQ ID NO: 3995 - RNA, 19 nt, synthetic construct
  source 1..19: mol_type = other RNA
cttcagccacctccactgg

SEQ ID NO: 3996 - RNA, 19 nt, synthetic construct
  source 1..19: mol_type = other RNA
ttcagccacctccactggg

SEQ ID NO: 3997 - RNA, 19 nt, synthetic construct
  source 1..19: mol_type = other RNA
tcagccacctccactgggg

SEQ ID NO: 3998 - RNA, 19 nt, synthetic construct
  source 1..19: mol_type = other RNA
cagccacctccactggggc

SEQ ID NO: 3999 - RNA, 19 nt, synthetic construct
  source 1..19: mol_type = other RNA
agccacctccactggggca

SEQ ID NO: 4000 - RNA, 19 nt, synthetic construct
  source 1..19: mol_type = other RNA
gccacctccactggggcat

SEQ ID NO: 4001 - RNA, 19 nt, synthetic construct
  source 1..19: mol_type = other RNA
ccacctccactggggcatc

SEQ ID NO: 4002 - RNA, 19 nt, synthetic construct
  source 1..19: mol_type = other RNA
cacctccactggggcatct

SEQ ID NO: 4003 - RNA, 19 nt, synthetic construct
  source 1..19: mol_type = other RNA
acctccactggggcatctt

SEQ ID NO: 4004 - RNA, 19 nt, synthetic construct
  source 1..19: mol_type = other RNA
cctccactggggcatcttc

SEQ ID NO: 4005 - RNA, 19 nt, synthetic construct
  source 1..19: mol_type = other RNA
ctccactggggcatcttca

SEQ ID NO: 4006 - RNA, 19 nt, synthetic construct
  source 1..19: mol_type = other RNA
tccactggggcatcttcac

SEQ ID NO: 4007 - RNA, 19 nt, synthetic construct
  source 1..19: mol_type = other RNA
ccactggggcatcttcaca

SEQ ID NO: 4008 - RNA, 19 nt, synthetic construct
  source 1..19: mol_type = other RNA
cactggggcatcttcacag

SEQ ID NO: 4009 - RNA, 19 nt, synthetic construct
  source 1..19: mol_type = other RNA
actggggcatcttcacaga

SEQ ID NO: 4010 - RNA, 19 nt, synthetic construct
  source 1..19: mol_type = other RNA
ctggggcatcttcacagag

SEQ ID NO: 4011 - RNA, 19 nt, synthetic construct
  source 1..19: mol_type = other RNA
tggggcatcttcacagaga

SEQ ID NO: 4012 - RNA, 19 nt, synthetic construct
  source 1..19: mol_type = other RNA
ggggcatcttcacagagat

SEQ ID NO: 4013 - RNA, 19 nt, synthetic construct
  source 1..19: mol_type = other RNA
gggcatcttcacagagatt

SEQ ID NO: 4014 - RNA, 19 nt, synthetic construct
  source 1..19: mol_type = other RNA
ggcatcttcacagagattc

SEQ ID NO: 4015 - RNA, 19 nt, synthetic construct
  source 1..19: mol_type = other RNA
gcatcttcacagagattca

SEQ ID NO: 4016 - RNA, 19 nt, synthetic construct
  source 1..19: mol_type = other RNA
catcttcacagagattcag

SEQ ID NO: 4017 - RNA, 19 nt, synthetic construct
  source 1..19: mol_type = other RNA
atcttcacagagattcaga

SEQ ID NO: 4018 - RNA, 19 nt, synthetic construct
  source 1..19: mol_type = other RNA
tcttcacagagattcagac

SEQ ID NO: 4019 - RNA, 19 nt, synthetic construct
  source 1..19: mol_type = other RNA
cttcacagagattcagact

SEQ ID NO: 4020 - RNA, 19 nt, synthetic construct
  source 1..19: mol_type = other RNA
ttcacagagattcagactg

SEQ ID NO: 4021 - RNA, 19 nt, synthetic construct
  source 1..19: mol_type = other RNA
tcacagagattcagactgg

SEQ ID NO: 4022 - RNA, 19 nt, synthetic construct
  source 1..19: mol_type = other RNA
cacagagattcagactggc

SEQ ID NO: 4023 - RNA, 19 nt, synthetic construct
  source 1..19: mol_type = other RNA
acagagattcagactggct

SEQ ID NO: 4024 - RNA, 19 nt, synthetic construct
  source 1..19: mol_type = other RNA
cagagattcagactggctc

SEQ ID NO: 4025 - RNA, 19 nt, synthetic construct
  source 1..19: mol_type = other RNA
agagattcagactggctca

SEQ ID NO: 4026 - RNA, 19 nt, synthetic construct
  source 1..19: mol_type = other RNA
gagattcagactggctcag

SEQ ID NO: 4027 - RNA, 19 nt, synthetic construct
  source 1..19: mol_type = other RNA
agattcagactggctcaga

SEQ ID NO: 4028 - RNA, 19 nt, synthetic construct
  source 1..19: mol_type = other RNA
gattcagactggctcagag

SEQ ID NO: 4029 - RNA, 19 nt, synthetic construct
  source 1..19: mol_type = other RNA
attcagactggctcagaga

SEQ ID NO: 4030 - RNA, 19 nt, synthetic construct
  source 1..19: mol_type = other RNA
ttcagactggctcagagac

SEQ ID NO: 4031 - RNA, 19 nt, synthetic construct
  source 1..19: mol_type = other RNA
tcagactggctcagagaca

SEQ ID NO: 4032 - RNA, 19 nt, synthetic construct
  source 1..19: mol_type = other RNA
cagactggctcagagacat

SEQ ID NO: 4033 - RNA, 19 nt, synthetic construct
  source 1..19: mol_type = other RNA
agactggctcagagacatt

SEQ ID NO: 4034 - RNA, 19 nt, synthetic construct
  source 1..19: mol_type = other RNA
gactggctcagagacatta

SEQ ID NO: 4035 - RNA, 19 nt, synthetic construct
  source 1..19: mol_type = other RNA
actggctcagagacattag

SEQ ID NO: 4036 - RNA, 19 nt, synthetic construct
  source 1..19: mol_type = other RNA
ctggctcagagacattagt

SEQ ID NO: 4037 - RNA, 19 nt, synthetic construct
  source 1..19: mol_type = other RNA
tggctcagagacattagta

SEQ ID NO: 4038 - RNA, 19 nt, synthetic construct
  source 1..19: mol_type = other RNA
ggctcagagacattagtac

SEQ ID NO: 4039 - RNA, 19 nt, synthetic construct
  source 1..19: mol_type = other RNA
gctcagagacattagtacg

SEQ ID NO: 4040 - RNA, 19 nt, synthetic construct
  source 1..19: mol_type = other RNA
ctcagagacattagtacgt

SEQ ID NO: 4041 - RNA, 19 nt, synthetic construct
  source 1..19: mol_type = other RNA
tcagagacattagtacgtg

SEQ ID NO: 4042 - RNA, 19 nt, synthetic construct
  source 1..19: mol_type = other RNA
cagagacattagtacgtgt

SEQ ID NO: 4043 - RNA, 19 nt, synthetic construct
  source 1..19: mol_type = other RNA
agagacattagtacgtgtc

SEQ ID NO: 4044 - RNA, 19 nt, synthetic construct
  source 1..19: mol_type = other RNA
gagacattagtacgtgtcc

SEQ ID NO: 4045 - RNA, 19 nt, synthetic construct
  source 1..19: mol_type = other RNA
agacattagtacgtgtcca

SEQ ID NO: 4046 - RNA, 19 nt, synthetic construct
  source 1..19: mol_type = other RNA
gacattagtacgtgtccaa

SEQ ID NO: 4047 - RNA, 19 nt, synthetic construct
  source 1..19: mol_type = other RNA
acattagtacgtgtccaaa

SEQ ID NO: 4048 - RNA, 19 nt, synthetic construct
  source 1..19: mol_type = other RNA
cattagtacgtgtccaaat

SEQ ID NO: 4049 - RNA, 19 nt, synthetic construct
  source 1..19: mol_type = other RNA
attagtacgtgtccaaatt

SEQ ID NO: 4050 - RNA, 19 nt, synthetic construct
  source 1..19: mol_type = other RNA
ttagtacgtgtccaaattc

SEQ ID NO: 4051 - RNA, 19 nt, synthetic construct
  source 1..19: mol_type = other RNA
tagtacgtgtccaaattcg

SEQ ID NO: 4052 - RNA, 19 nt, synthetic construct
  source 1..19: mol_type = other RNA
agtacgtgtccaaattcgc

SEQ ID NO: 4053 - RNA, 19 nt, synthetic construct
  source 1..19: mol_type = other RNA
gtacgtgtccaaattcgcc

SEQ ID NO: 4054 - RNA, 19 nt, synthetic construct
  source 1..19: mol_type = other RNA
tacgtgtccaaattcgcca

SEQ ID NO: 4055 - RNA, 19 nt, synthetic construct
  source 1..19: mol_type = other RNA
acgtgtccaaattcgccaa

SEQ ID NO: 4056 - RNA, 19 nt, synthetic construct
  source 1..19: mol_type = other RNA
cgtgtccaaattcgccaag

SEQ ID NO: 4057 - RNA, 19 nt, synthetic construct
  source 1..19: mol_type = other RNA
gtgtccaaattcgccaagc

SEQ ID NO: 4058 - RNA, 19 nt, synthetic construct
  source 1..19: mol_type = other RNA
tgtccaaattcgccaagca

SEQ ID NO: 4059 - RNA, 19 nt, synthetic construct
  source 1..19: mol_type = other RNA
gtccaaattcgccaagcac

SEQ ID NO: 4060 - RNA, 19 nt, synthetic construct
  source 1..19: mol_type = other RNA
tccaaattcgccaagcact

SEQ ID NO: 4061 - RNA, 19 nt, synthetic construct
  source 1..19: mol_type = other RNA
ccaaattcgccaagcactc

SEQ ID NO: 4062 - RNA, 19 nt, synthetic construct
  source 1..19: mol_type = other RNA
caaattcgccaagcactcc

SEQ ID NO: 4063 - RNA, 19 nt, synthetic construct
  source 1..19: mol_type = other RNA
aaattcgccaagcactcct

SEQ ID NO: 4064 - RNA, 19 nt, synthetic construct
  source 1..19: mol_type = other RNA
aattcgccaagcactcctc

SEQ ID NO: 4065 - RNA, 19 nt, synthetic construct
  source 1..19: mol_type = other RNA
attcgccaagcactcctcc

SEQ ID NO: 4066 - RNA, 19 nt, synthetic construct
  source 1..19: mol_type = other RNA
ttcgccaagcactcctcct

SEQ ID NO: 4067 - RNA, 19 nt, synthetic construct
  source 1..19: mol_type = other RNA
tcgccaagcactcctccta

SEQ ID NO: 4068 - RNA, 19 nt, synthetic construct
  source 1..19: mol_type = other RNA
cgccaagcactcctcctag

SEQ ID NO: 4069 - RNA, 19 nt, synthetic construct
  source 1..19: mol_type = other RNA
gccaagcactcctcctagc

SEQ ID NO: 4070 - RNA, 19 nt, synthetic construct
  source 1..19: mol_type = other RNA
ccaagcactcctcctagca

SEQ ID NO: 4071 - RNA, 19 nt, synthetic construct
  source 1..19: mol_type = other RNA
caagcactcctcctagcac

SEQ ID NO: 4072 - RNA, 19 nt, synthetic construct
  source 1..19: mol_type = other RNA
aagcactcctcctagcaca

SEQ ID NO: 4073 - RNA, 19 nt, synthetic construct
  source 1..19: mol_type = other RNA
agcactcctcctagcacac

SEQ ID NO: 4074 - RNA, 19 nt, synthetic construct
  source 1..19: mol_type = other RNA
gcactcctcctagcacacc

SEQ ID NO: 4075 - RNA, 19 nt, synthetic construct
  source 1..19: mol_type = other RNA
cactcctcctagcacaccc

SEQ ID NO: 4076 - RNA, 19 nt, synthetic construct
  source 1..19: mol_type = other RNA
actcctcctagcacaccct

SEQ ID NO: 4077 - RNA, 19 nt, synthetic construct
  source 1..19: mol_type = other RNA
ctcctcctagcacaccctc

SEQ ID NO: 4078 - RNA, 19 nt, synthetic construct
  source 1..19: mol_type = other RNA
tcctcctagcacaccctct

SEQ ID NO: 4079 - RNA, 19 nt, synthetic construct
  source 1..19: mol_type = other RNA
cctcctagcacaccctctc

SEQ ID NO: 4080 - RNA, 19 nt, synthetic construct
  source 1..19: mol_type = other RNA
ctcctagcacaccctctcc

SEQ ID NO: 4081 - RNA, 19 nt, synthetic construct
  source 1..19: mol_type = other RNA
tcctagcacaccctctcca

SEQ ID NO: 4082 - RNA, 19 nt, synthetic construct
  source 1..19: mol_type = other RNA
cctagcacaccctctccaa

SEQ ID NO: 4083 - RNA, 19 nt, synthetic construct
  source 1..19: mol_type = other RNA
ctagcacaccctctccaag

SEQ ID NO: 4084 - RNA, 19 nt, synthetic construct
  source 1..19: mol_type = other RNA
tagcacaccctctccaagg

SEQ ID NO: 4085 - RNA, 19 nt, synthetic construct
  source 1..19: mol_type = other RNA
agcacaccctctccaaggg

SEQ ID NO: 4086 - RNA, 19 nt, synthetic construct
  source 1..19: mol_type = other RNA
gcacaccctctccaagggt

SEQ ID NO: 4087 - RNA, 19 nt, synthetic construct
  source 1..19: mol_type = other RNA
cacaccctctccaagggta

SEQ ID NO: 4088 - RNA, 19 nt, synthetic construct
  source 1..19: mol_type = other RNA
acaccctctccaagggtac

SEQ ID NO: 4089 - RNA, 19 nt, synthetic construct
  source 1..19: mol_type = other RNA
caccctctccaagggtacc

SEQ ID NO: 4090 - RNA, 19 nt, synthetic construct
  source 1..19: mol_type = other RNA
accctctccaagggtaccg

SEQ ID NO: 4091 - RNA, 19 nt, synthetic construct
  source 1..19: mol_type = other RNA
ccctctccaagggtaccgc

SEQ ID NO: 4092 - RNA, 19 nt, synthetic construct
  source 1..19: mol_type = other RNA
cctctccaagggtaccgcg

SEQ ID NO: 4093 - RNA, 19 nt, synthetic construct
  source 1..19: mol_type = other RNA
ctctccaagggtaccgcgt

SEQ ID NO: 4094 - RNA, 19 nt, synthetic construct
  source 1..19: mol_type = other RNA
tctccaagggtaccgcgtc

SEQ ID NO: 4095 - RNA, 19 nt, synthetic construct
  source 1..19: mol_type = other RNA
ctccaagggtaccgcgtcg

SEQ ID NO: 4096 - RNA, 19 nt, synthetic construct
  source 1..19: mol_type = other RNA
tccaagggtaccgcgtcga

SEQ ID NO: 4097 - RNA, 19 nt, synthetic construct
  source 1..19: mol_type = other RNA
ccaagggtaccgcgtcgat

SEQ ID NO: 4098 - RNA, 19 nt, synthetic construct
  source 1..19: mol_type = other RNA
caagggtaccgcgtcgatg

SEQ ID NO: 4099 - RNA, 19 nt, synthetic construct
  source 1..19: mol_type = other RNA
aagggtaccgcgtcgatgc

SEQ ID NO: 4100 - RNA, 19 nt, synthetic construct
  source 1..19: mol_type = other RNA
agggtaccgcgtcgatgct

SEQ ID NO: 4101 - RNA, 19 nt, synthetic construct
  source 1..19: mol_type = other RNA
gggtaccgcgtcgatgcta

SEQ ID NO: 4102 - RNA, 19 nt, synthetic construct
  source 1..19: mol_type = other RNA
ggtaccgcgtcgatgctat

SEQ ID NO: 4103 - RNA, 19 nt, synthetic construct
  source 1..19: mol_type = other RNA
gtaccgcgtcgatgctatg

SEQ ID NO: 4104 - RNA, 19 nt, synthetic construct
  source 1..19: mol_type = other RNA
taccgcgtcgatgctatgt

SEQ ID NO: 4105 - RNA, 19 nt, synthetic construct
  source 1..19: mol_type = other RNA
accgcgtcgatgctatgtg

SEQ ID NO: 4106 - RNA, 19 nt, synthetic construct
  source 1..19: mol_type = other RNA
ccgcgtcgatgctatgtgc

SEQ ID NO: 4107 - RNA, 19 nt, synthetic construct
  source 1..19: mol_type = other RNA
cgcgtcgatgctatgtgct

SEQ ID NO: 4108 - RNA, 19 nt, synthetic construct
  source 1..19: mol_type = other RNA
gcgtcgatgctatgtgctc

SEQ ID NO: 4109 - RNA, 19 nt, synthetic construct
  source 1..19: mol_type = other RNA
cgtcgatgctatgtgctca

SEQ ID NO: 4110 - RNA, 19 nt, synthetic construct
  source 1..19: mol_type = other RNA
gtcgatgctatgtgctcag

SEQ ID NO: 4111 - RNA, 19 nt, synthetic construct
  source 1..19: mol_type = other RNA
tcgatgctatgtgctcagt

SEQ ID NO: 4112 - RNA, 19 nt, synthetic construct
  source 1..19: mol_type = other RNA
cgatgctatgtgctcagtt

SEQ ID NO: 4113 - RNA, 19 nt, synthetic construct
  source 1..19: mol_type = other RNA
gatgctatgtgctcagttc

SEQ ID NO: 4114 - RNA, 19 nt, synthetic construct
  source 1..19: mol_type = other RNA
atgctatgtgctcagttct

SEQ ID NO: 4115 - RNA, 19 nt, synthetic construct
  source 1..19: mol_type = other RNA
tgctatgtgctcagttcta

SEQ ID NO: 4116 - RNA, 19 nt, synthetic construct
  source 1..19: mol_type = other RNA
gctatgtgctcagttctag

SEQ ID NO: 4117 - RNA, 19 nt, synthetic construct
  source 1..19: mol_type = other RNA
ctatgtgctcagttctagt

SEQ ID NO: 4118 - RNA, 19 nt, synthetic construct
  source 1..19: mol_type = other RNA
tatgtgctcagttctagtc

SEQ ID NO: 4119 - RNA, 19 nt, synthetic construct
  source 1..19: mol_type = other RNA
atgtgctcagttctagtca

SEQ ID NO: 4120 - RNA, 19 nt, synthetic construct
  source 1..19: mol_type = other RNA
tgtgctcagttctagtcag

SEQ ID NO: 4121 - RNA, 19 nt, synthetic construct
  source 1..19: mol_type = other RNA
gtgctcagttctagtcaga

SEQ ID NO: 4122 - RNA, 19 nt, synthetic construct
  source 1..19: mol_type = other RNA
tgctcagttctagtcagaa

SEQ ID NO: 4123 - RNA, 19 nt, synthetic construct
  source 1..19: mol_type = other RNA
gctcagttctagtcagaat

SEQ ID NO: 4124 - RNA, 19 nt, synthetic construct
  source 1..19: mol_type = other RNA
ctcagttctagtcagaata

SEQ ID NO: 4125 - RNA, 19 nt, synthetic construct
  source 1..19: mol_type = other RNA
tcagttctagtcagaataa

SEQ ID NO: 4126 - RNA, 19 nt, synthetic construct
  source 1..19: mol_type = other RNA
cagttctagtcagaataat

SEQ ID NO: 4127 - RNA, 19 nt, synthetic construct
  source 1..19: mol_type = other RNA
agttctagtcagaataatc

SEQ ID NO: 4128 - RNA, 19 nt, synthetic construct
  source 1..19: mol_type = other RNA
gttctagtcagaataatct

SEQ ID NO: 4129 - RNA, 19 nt, synthetic construct
  source 1..19: mol_type = other RNA
ttctagtcagaataatctt

SEQ ID NO: 4130 - RNA, 19 nt, synthetic construct
  source 1..19: mol_type = other RNA
tctagtcagaataatcttg

SEQ ID NO: 4131 - RNA, 19 nt, synthetic construct
  source 1..19: mol_type = other RNA
ctagtcagaataatcttgc

SEQ ID NO: 4132 - RNA, 19 nt, synthetic construct
  source 1..19: mol_type = other RNA
tagtcagaataatcttgct

SEQ ID NO: 4133 - RNA, 19 nt, synthetic construct
  source 1..19: mol_type = other RNA
agtcagaataatcttgctc

SEQ ID NO: 4134 - RNA, 19 nt, synthetic construct
  source 1..19: mol_type = other RNA
gtcagaataatcttgctca

SEQ ID NO: 4135 - RNA, 19 nt, synthetic construct
  source 1..19: mol_type = other RNA
tcagaataatcttgctcat

SEQ ID NO: 4136 - RNA, 19 nt, synthetic construct
  source 1..19: mol_type = other RNA
cagaataatcttgctcatc

SEQ ID NO: 4137 - RNA, 19 nt, synthetic construct
  source 1..19: mol_type = other RNA
agaataatcttgctcatcc

SEQ ID NO: 4138 - RNA, 19 nt, synthetic construct
  source 1..19: mol_type = other RNA
gaataatcttgctcatcct

SEQ ID NO: 4139 - RNA, 19 nt, synthetic construct
  source 1..19: mol_type = other RNA
aataatcttgctcatcctc

SEQ ID NO: 4140 - RNA, 19 nt, synthetic construct
  source 1..19: mol_type = other RNA
ataatcttgctcatcctcc

SEQ ID NO: 4141 - RNA, 19 nt, synthetic construct
  source 1..19: mol_type = other RNA
taatcttgctcatcctcca

SEQ ID NO: 4142 - RNA, 19 nt, synthetic construct
  source 1..19: mol_type = other RNA
aatcttgctcatcctccag

SEQ ID NO: 4143 - RNA, 19 nt, synthetic construct
  source 1..19: mol_type = other RNA
atcttgctcatcctccagc

SEQ ID NO: 4144 - RNA, 19 nt, synthetic construct
  source 1..19: mol_type = other RNA
tcttgctcatcctccagct

SEQ ID NO: 4145 - RNA, 19 nt, synthetic construct
  source 1..19: mol_type = other RNA
cttgctcatcctccagctc

SEQ ID NO: 4146 - RNA, 19 nt, synthetic construct
  source 1..19: mol_type = other RNA
ttgctcatcctccagctcc

SEQ ID NO: 4147 - RNA, 19 nt, synthetic construct
  source 1..19: mol_type = other RNA
tgctcatcctccagctccc

SEQ ID NO: 4148 - RNA, 19 nt, synthetic construct
  source 1..19: mol_type = other RNA
gctcatcctccagctcccc

SEQ ID NO: 4149 - RNA, 19 nt, synthetic construct
  source 1..19: mol_type = other RNA
ctcatcctccagctccccc

SEQ ID NO: 4150 - RNA, 19 nt, synthetic construct
  source 1..19: mol_type = other RNA
tcatcctccagctccccct

SEQ ID NO: 4151 - RNA, 19 nt, synthetic construct
  source 1..19: mol_type = other RNA
catcctccagctccccctg

SEQ ID NO: 4152 - RNA, 19 nt, synthetic construct
  source 1..19: mol_type = other RNA
atcctccagctccccctgt

SEQ ID NO: 4153 - RNA, 19 nt, synthetic construct
  source 1..19: mol_type = other RNA
tcctccagctccccctgtt

SEQ ID NO: 4154 - RNA, 19 nt, synthetic construct
  source 1..19: mol_type = other RNA
cctccagctccccctgttc

SEQ ID NO: 4155 - RNA, 19 nt, synthetic construct
  source 1..19: mol_type = other RNA
ctccagctccccctgttcc

SEQ ID NO: 4156 - RNA, 19 nt, synthetic construct
  source 1..19: mol_type = other RNA
tccagctccccctgttcca

SEQ ID NO: 4157 - RNA, 19 nt, synthetic construct
  source 1..19: mol_type = other RNA
ccagctccccctgttccac

SEQ ID NO: 4158 - RNA, 19 nt, synthetic construct
  source 1..19: mol_type = other RNA
cagctccccctgttccacc

SEQ ID NO: 4159 - RNA, 19 nt, synthetic construct
  source 1..19: mol_type = other RNA
agctccccctgttccacca

SEQ ID NO: 4160 - RNA, 19 nt, synthetic construct
  source 1..19: mol_type = other RNA
gctccccctgttccaccaa

SEQ ID NO: 4161 - RNA, 19 nt, synthetic construct
  source 1..19: mol_type = other RNA
ctccccctgttccaccaag

SEQ ID NO: 4162 - RNA, 19 nt, synthetic construct
  source 1..19: mol_type = other RNA
tccccctgttccaccaagg

SEQ ID NO: 4163 - RNA, 19 nt, synthetic construct
  source 1..19: mol_type = other RNA
ccccctgttccaccaaggc

SEQ ID NO: 4164 - RNA, 19 nt, synthetic construct
  source 1..19: mol_type = other RNA
cccctgttccaccaaggca

SEQ ID NO: 4165 - RNA, 19 nt, synthetic construct
  source 1..19: mol_type = other RNA
ccctgttccaccaaggcag

SEQ ID NO: 4166 - RNA, 19 nt, synthetic construct
  source 1..19: mol_type = other RNA
cctgttccaccaaggcaga

SEQ ID NO: 4167 - RNA, 19 nt, synthetic construct
  source 1..19: mol_type = other RNA
ctgttccaccaaggcagaa

SEQ ID NO: 4168 - RNA, 19 nt, synthetic construct
  source 1..19: mol_type = other RNA
tgttccaccaaggcagaat

SEQ ID NO: 4169 - RNA, 19 nt, synthetic construct
  source 1..19: mol_type = other RNA
gttccaccaaggcagaatt

SEQ ID NO: 4170 - RNA, 19 nt, synthetic construct
  source 1..19: mol_type = other RNA
ttccaccaaggcagaattc

SEQ ID NO: 4171 - RNA, 19 nt, synthetic construct
  source 1..19: mol_type = other RNA
tccaccaaggcagaattca

SEQ ID NO: 4172 - RNA, 19 nt, synthetic construct
  source 1..19: mol_type = other RNA
ccaccaaggcagaattcaa

SEQ ID NO: 4173 - RNA, 19 nt, synthetic construct
  source 1..19: mol_type = other RNA
caccaaggcagaattcaag

SEQ ID NO: 4174 - RNA, 19 nt, synthetic construct
  source 1..19: mol_type = other RNA
accaaggcagaattcaagc

SEQ ID NO: 4175 - RNA, 19 nt, synthetic construct
  source 1..19: mol_type = other RNA
ccaaggcagaattcaagcc

SEQ ID NO: 4176 - RNA, 19 nt, synthetic construct
  source 1..19: mol_type = other RNA
caaggcagaattcaagccc

SEQ ID NO: 4177 - RNA, 19 nt, synthetic construct
  source 1..19: mol_type = other RNA
aaggcagaattcaagccct

SEQ ID NO: 4178 - RNA, 19 nt, synthetic construct
  source 1..19: mol_type = other RNA
aggcagaattcaagccctc

SEQ ID NO: 4179 - RNA, 19 nt, synthetic construct
  source 1..19: mol_type = other RNA
ggcagaattcaagccctca

SEQ ID NO: 4180 - RNA, 19 nt, synthetic construct
  source 1..19: mol_type = other RNA
gcagaattcaagccctcat

SEQ ID NO: 4181 - RNA, 19 nt, synthetic construct
  source 1..19: mol_type = other RNA
cagaattcaagccctcatc

SEQ ID NO: 4182 - RNA, 19 nt, synthetic construct
  source 1..19: mol_type = other RNA
agaattcaagccctcatct

SEQ ID NO: 4183 - RNA, 19 nt, synthetic construct
  source 1..19: mol_type = other RNA
gaattcaagccctcatctg

SEQ ID NO: 4184 - RNA, 19 nt, synthetic construct
  source 1..19: mol_type = other RNA
aattcaagccctcatctgc

SEQ ID NO: 4185 - RNA, 19 nt, synthetic construct
  source 1..19: mol_type = other RNA
attcaagccctcatctgcc

SEQ ID NO: 4186 - RNA, 19 nt, synthetic construct
  source 1..19: mol_type = other RNA
ttcaagccctcatctgcca

SEQ ID NO: 4187 - RNA, 19 nt, synthetic construct
  source 1..19: mol_type = other RNA
tcaagccctcatctgccaa

SEQ ID NO: 4188 - RNA, 19 nt, synthetic construct
  source 1..19: mol_type = other RNA
caagccctcatctgccaaa

SEQ ID NO: 4189 - RNA, 19 nt, synthetic construct
  source 1..19: mol_type = other RNA
aagccctcatctgccaaaa

SEQ ID NO: 4190 - RNA, 19 nt, synthetic construct
  source 1..19: mol_type = other RNA
agccctcatctgccaaaac

SEQ ID NO: 4191 - RNA, 19 nt, synthetic construct
  source 1..19: mol_type = other RNA
gccctcatctgccaaaact

SEQ ID NO: 4192 - RNA, 19 nt, synthetic construct
  source 1..19: mol_type = other RNA
ccctcatctgccaaaactg

SEQ ID NO: 4193 - RNA, 19 nt, synthetic construct
  source 1..19: mol_type = other RNA
cctcatctgccaaaactgc

SEQ ID NO: 4194 - RNA, 19 nt, synthetic construct
  source 1..19: mol_type = other RNA
ctcatctgccaaaactgcc

SEQ ID NO: 4195 - RNA, 19 nt, synthetic construct
  source 1..19: mol_type = other RNA
tcatctgccaaaactgcca

SEQ ID NO: 4196 - RNA, 19 nt, synthetic construct
  source 1..19: mol_type = other RNA
catctgccaaaactgccac

SEQ ID NO: 4197 - RNA, 19 nt, synthetic construct
  source 1..19: mol_type = other RNA
atctgccaaaactgccacc

SEQ ID NO: 4198 - RNA, 19 nt, synthetic construct
  source 1..19: mol_type = other RNA
tctgccaaaactgccacca

SEQ ID NO: 4199 - RNA, 19 nt, synthetic construct
  source 1..19: mol_type = other RNA
ctgccaaaactgccaccaa

SEQ ID NO: 4200 - RNA, 19 nt, synthetic construct
  source 1..19: mol_type = other RNA
tgccaaaactgccaccaaa

SEQ ID NO: 4201 - RNA, 19 nt, synthetic construct
  source 1..19: mol_type = other RNA
gccaaaactgccaccaaag

SEQ ID NO: 4202 - RNA, 19 nt, synthetic construct
  source 1..19: mol_type = other RNA
ccaaaactgccaccaaaga

SEQ ID NO: 4203 - RNA, 19 nt, synthetic construct
  source 1..19: mol_type = other RNA
caaaactgccaccaaagac

SEQ ID NO: 4204 - RNA, 19 nt, synthetic construct
  source 1..19: mol_type = other RNA
aaaactgccaccaaagact

SEQ ID NO: 4205 - RNA, 19 nt, synthetic construct
  source 1..19: mol_type = other RNA
aaactgccaccaaagactt

SEQ ID NO: 4206 - RNA, 19 nt, synthetic construct
  source 1..19: mol_type = other RNA
aactgccaccaaagactta

SEQ ID NO: 4207 - RNA, 19 nt, synthetic construct
  source 1..19: mol_type = other RNA
actgccaccaaagacttac

SEQ ID NO: 4208 - RNA, 19 nt, synthetic construct
  source 1..19: mol_type = other RNA
ctgccaccaaagacttaca

SEQ ID NO: 4209 - RNA, 19 nt, synthetic construct
  source 1..19: mol_type = other RNA
tgccaccaaagacttacaa

SEQ ID NO: 4210 - RNA, 19 nt, synthetic construct
  source 1..19: mol_type = other RNA
gccaccaaagacttacaaa

SEQ ID NO: 4211 - RNA, 19 nt, synthetic construct
  source 1..19: mol_type = other RNA
ccaccaaagacttacaaac

SEQ ID NO: 4212 - RNA, 19 nt, synthetic construct
  source 1..19: mol_type = other RNA
caccaaagacttacaaacg

SEQ ID NO: 4213 - RNA, 19 nt, synthetic construct
  source 1..19: mol_type = other RNA
accaaagacttacaaacgg

SEQ ID NO: 4214 - RNA, 19 nt, synthetic construct
  source 1..19: mol_type = other RNA
ccaaagacttacaaacggg

SEQ ID NO: 4215 - RNA, 19 nt, synthetic construct
  source 1..19: mol_type = other RNA
caaagacttacaaacggga

SEQ ID NO: 4216 - RNA, 19 nt, synthetic construct
  source 1..19: mol_type = other RNA
aaagacttacaaacgggag

SEQ ID NO: 4217 - RNA, 19 nt, synthetic construct
  source 1..19: mol_type = other RNA
aagacttacaaacgggagc

SEQ ID NO: 4218 - RNA, 19 nt, synthetic construct
  source 1..19: mol_type = other RNA
agacttacaaacgggagct

SEQ ID NO: 4219 - RNA, 19 nt, synthetic construct
  source 1..19: mol_type = other RNA
gacttacaaacgggagctt

SEQ ID NO: 4220 - RNA, 19 nt, synthetic construct
  source 1..19: mol_type = other RNA
acttacaaacgggagcttt

SEQ ID NO: 4221 - RNA, 19 nt, synthetic construct
  source 1..19: mol_type = other RNA
cttacaaacgggagctttc

SEQ ID NO: 4222 - RNA, 19 nt, synthetic construct
  source 1..19: mol_type = other RNA
ttacaaacgggagctttcg

SEQ ID NO: 4223 - RNA, 19 nt, synthetic construct
  source 1..19: mol_type = other RNA
tacaaacgggagctttcgc

SEQ ID NO: 4224 - RNA, 19 nt, synthetic construct
  source 1..19: mol_type = other RNA
acaaacgggagctttcgca

SEQ ID NO: 4225 - RNA, 19 nt, synthetic construct
  source 1..19: mol_type = other RNA
caaacgggagctttcgcac

SEQ ID NO: 4226 - RNA, 19 nt, synthetic construct
  source 1..19: mol_type = other RNA
aaacgggagctttcgcacc

SEQ ID NO: 4227 - RNA, 19 nt, synthetic construct
  source 1..19: mol_type = other RNA
aacgggagctttcgcaccc

SEQ ID NO: 4228 - RNA, 19 nt, synthetic construct
  source 1..19: mol_type = other RNA
acgggagctttcgcacccc

SEQ ID NO: 4229 - RNA, 19 nt, synthetic construct
  source 1..19: mol_type = other RNA
cgggagctttcgcaccccc

SEQ ID NO: 4230 - RNA, 19 nt, synthetic construct
  source 1..19: mol_type = other RNA
gggagctttcgcacccccc

SEQ ID NO: 4231 - RNA, 19 nt, synthetic construct
  source 1..19: mol_type = other RNA
ggagctttcgcacccccca

SEQ ID NO: 4232 - RNA, 19 nt, synthetic construct
  source 1..19: mol_type = other RNA
gagctttcgcaccccccat

SEQ ID NO: 4233 - RNA, 19 nt, synthetic construct
  source 1..19: mol_type = other RNA
agctttcgcaccccccatt

SEQ ID NO: 4234 - RNA, 19 nt, synthetic construct
  source 1..19: mol_type = other RNA
gctttcgcaccccccattg

SEQ ID NO: 4235 - RNA, 19 nt, synthetic construct
  source 1..19: mol_type = other RNA
ctttcgcaccccccattgt

SEQ ID NO: 4236 - RNA, 19 nt, synthetic construct
  source 1..19: mol_type = other RNA
tttcgcaccccccattgta

SEQ ID NO: 4237 - RNA, 19 nt, synthetic construct
  source 1..19: mol_type = other RNA
ttcgcaccccccattgtac

SEQ ID NO: 4238 - RNA, 19 nt, synthetic construct
  source 1..19: mol_type = other RNA
tcgcaccccccattgtaca

SEQ ID NO: 4239 - RNA, 19 nt, synthetic construct
  source 1..19: mol_type = other RNA
cgcaccccccattgtacag

SEQ ID NO: 4240 - RNA, 19 nt, synthetic construct
  source 1..19: mol_type = other RNA
gcaccccccattgtacaga

SEQ ID NO: 4241 - RNA, 19 nt, synthetic construct
  source 1..19: mol_type = other RNA
caccccccattgtacagac

SEQ ID NO: 4242 - RNA, 19 nt, synthetic construct
  source 1..19: mol_type = other RNA
accccccattgtacagact

SEQ ID NO: 4243 - RNA, 19 nt, synthetic construct
  source 1..19: mol_type = other RNA
ccccccattgtacagactg

SEQ ID NO: 4244 - RNA, 19 nt, synthetic construct
  source 1..19: mol_type = other RNA
cccccattgtacagactgc

SEQ ID NO: 4245 - RNA, 19 nt, synthetic construct
  source 1..19: mol_type = other RNA
ccccattgtacagactgcc

SEQ ID NO: 4246 - RNA, 19 nt, synthetic construct
  source 1..19: mol_type = other RNA
cccattgtacagactgcct

SEQ ID NO: 4247 - RNA, 19 nt, synthetic construct
  source 1..19: mol_type = other RNA
ccattgtacagactgcctt

SEQ ID NO: 4248 - RNA, 19 nt, synthetic construct
  source 1..19: mol_type = other RNA
cattgtacagactgccttt

SEQ ID NO: 4249 - RNA, 19 nt, synthetic construct
  source 1..19: mol_type = other RNA
attgtacagactgcctttg

SEQ ID NO: 4250 - RNA, 19 nt, synthetic construct
  source 1..19: mol_type = other RNA
ttgtacagactgcctttgc

SEQ ID NO: 4251 - RNA, 19 nt, synthetic construct
  source 1..19: mol_type = other RNA
tgtacagactgcctttgct

SEQ ID NO: 4252 - RNA, 19 nt, synthetic construct
  source 1..19: mol_type = other RNA
gtacagactgcctttgcta

SEQ ID NO: 4253 - RNA, 19 nt, synthetic construct
  source 1..19: mol_type = other RNA
tacagactgcctttgctag

SEQ ID NO: 4254 - RNA, 19 nt, synthetic construct
  source 1..19: mol_type = other RNA
acagactgcctttgctaga

SEQ ID NO: 4255 - RNA, 19 nt, synthetic construct
  source 1..19: mol_type = other RNA
cagactgcctttgctagaa

SEQ ID NO: 4256 - RNA, 19 nt, synthetic construct
  source 1..19: mol_type = other RNA
agactgcctttgctagaaa

SEQ ID NO: 4257 - RNA, 19 nt, synthetic construct
  source 1..19: mol_type = other RNA
gactgcctttgctagaaaa

SEQ ID NO: 4258 - RNA, 19 nt, synthetic construct
  source 1..19: mol_type = other RNA
actgcctttgctagaaaat

SEQ ID NO: 4259 - RNA, 19 nt, synthetic construct
  source 1..19: mol_type = other RNA
ctgcctttgctagaaaatg

SEQ ID NO: 4260 - RNA, 19 nt, synthetic construct
  source 1..19: mol_type = other RNA
tgcctttgctagaaaatgc

SEQ ID NO: 4261 - RNA, 19 nt, synthetic construct
  source 1..19: mol_type = other RNA
gcctttgctagaaaatgca

SEQ ID NO: 4262 - RNA, 19 nt, synthetic construct
  source 1..19: mol_type = other RNA
cctttgctagaaaatgcag

SEQ ID NO: 4263 - RNA, 19 nt, synthetic construct
  source 1..19: mol_type = other RNA
ctttgctagaaaatgcaga

SEQ ID NO: 4264 - RNA, 19 nt, synthetic construct
  source 1..19: mol_type = other RNA
tttgctagaaaatgcagaa

SEQ ID NO: 4265 - RNA, 19 nt, synthetic construct
  source 1..19: mol_type = other RNA
ttgctagaaaatgcagaaa

SEQ ID NO: 4266 - RNA, 19 nt, synthetic construct
  source 1..19: mol_type = other RNA
tgctagaaaatgcagaaac

SEQ ID NO: 4267 - RNA, 19 nt, synthetic construct
  source 1..19: mol_type = other RNA
gctagaaaatgcagaaact

SEQ ID NO: 4268 - RNA, 19 nt, synthetic construct
  source 1..19: mol_type = other RNA
ctagaaaatgcagaaactc

SEQ ID NO: 4269 - RNA, 19 nt, synthetic construct
  source 1..19: mol_type = other RNA
tagaaaatgcagaaactcc

SEQ ID NO: 4270 - RNA, 19 nt, synthetic construct
  source 1..19: mol_type = other RNA
agaaaatgcagaaactccc

SEQ ID NO: 4271 - RNA, 19 nt, synthetic construct
  source 1..19: mol_type = other RNA
gaaaatgcagaaactcccc

SEQ ID NO: 4272 - RNA, 19 nt, synthetic construct
  source 1..19: mol_type = other RNA
aaaatgcagaaactcccca

SEQ ID NO: 4273 - RNA, 19 nt, synthetic construct
  source 1..19: mol_type = other RNA
aaatgcagaaactccccaa

SEQ ID NO: 4274 - RNA, 19 nt, synthetic construct
  source 1..19: mol_type = other RNA
aatgcagaaactccccaat

SEQ ID NO: 4275 - RNA, 19 nt, synthetic construct
  source 1..19: mol_type = other RNA
atgcagaaactccccaatg

SEQ ID NO: 4276 - RNA, 19 nt, synthetic construct
  source 1..19: mol_type = other RNA
tgcagaaactccccaatga

SEQ ID NO: 4277 - RNA, 19 nt, synthetic construct
  source 1..19: mol_type = other RNA
gcagaaactccccaatgac

SEQ ID NO: 4278 - RNA, 19 nt, synthetic construct
  source 1..19: mol_type = other RNA
cagaaactccccaatgacc

SEQ ID NO: 4279 - RNA, 19 nt, synthetic construct
  source 1..19: mol_type = other RNA
agaaactccccaatgacct

SEQ ID NO: 4280 - RNA, 19 nt, synthetic construct
  source 1..19: mol_type = other RNA
gaaactccccaatgacctt

SEQ ID NO: 4281 - RNA, 19 nt, synthetic construct
  source 1..19: mol_type = other RNA
aaactccccaatgacctta

SEQ ID NO: 4282 - RNA, 19 nt, synthetic construct
  source 1..19: mol_type = other RNA
aactccccaatgaccttag

SEQ ID NO: 4283 - RNA, 19 nt, synthetic construct
  source 1..19: mol_type = other RNA
actccccaatgaccttagc

SEQ ID NO: 4284 - RNA, 19 nt, synthetic construct
  source 1..19: mol_type = other RNA
ctccccaatgaccttagcc

SEQ ID NO: 4285 - RNA, 19 nt, synthetic construct
  source 1..19: mol_type = other RNA
tccccaatgaccttagcca

SEQ ID NO: 4286 - RNA, 19 nt, synthetic construct
  source 1..19: mol_type = other RNA
ccccaatgaccttagccat

SEQ ID NO: 4287 - RNA, 19 nt, synthetic construct
  source 1..19: mol_type = other RNA
cccaatgaccttagccata

SEQ ID NO: 4288 - RNA, 19 nt, synthetic construct
  source 1..19: mol_type = other RNA
ccaatgaccttagccatat

SEQ ID NO: 4289 - RNA, 19 nt, synthetic construct
  source 1..19: mol_type = other RNA
caatgaccttagccatatg

SEQ ID NO: 4290 - RNA, 19 nt, synthetic construct
  source 1..19: mol_type = other RNA
aatgaccttagccatatgt

SEQ ID NO: 4291 - RNA, 19 nt, synthetic construct
  source 1..19: mol_type = other RNA
atgaccttagccatatgta

SEQ ID NO: 4292 - RNA, 19 nt, synthetic construct
  source 1..19: mol_type = other RNA
tgaccttagccatatgtag

SEQ ID NO: 4293 - RNA, 19 nt, synthetic construct
  source 1..19: mol_type = other RNA
gaccttagccatatgtagt

SEQ ID NO: 4294 - RNA, 19 nt, synthetic construct
  source 1..19: mol_type = other RNA
accttagccatatgtagtc

SEQ ID NO: 4295 - RNA, 19 nt, synthetic construct
  source 1..19: mol_type = other RNA
ccttagccatatgtagtca

SEQ ID NO: 4296 - RNA, 19 nt, synthetic construct
  source 1..19: mol_type = other RNA
cttagccatatgtagtcat

SEQ ID NO: 4297 - RNA, 19 nt, synthetic construct
  source 1..19: mol_type = other RNA
ttagccatatgtagtcatt

SEQ ID NO: 4298 - RNA, 19 nt, synthetic construct
  source 1..19: mol_type = other RNA
tagccatatgtagtcattg

SEQ ID NO: 4299 - RNA, 19 nt, synthetic construct
  source 1..19: mol_type = other RNA
agccatatgtagtcattga

SEQ ID NO: 4300 - RNA, 19 nt, synthetic construct
  source 1..19: mol_type = other RNA
gccatatgtagtcattgac

SEQ ID NO: 4301 - RNA, 19 nt, synthetic construct
  source 1..19: mol_type = other RNA
ccatatgtagtcattgaca

SEQ ID NO: 4302 - RNA, 19 nt, synthetic construct
  source 1..19: mol_type = other RNA
catatgtagtcattgacac

SEQ ID NO: 4303 - RNA, 19 nt, synthetic construct
  source 1..19: mol_type = other RNA
atatgtagtcattgacact

SEQ ID NO: 4304 - RNA, 19 nt, synthetic construct
  source 1..19: mol_type = other RNA
tatgtagtcattgacactg

SEQ ID NO: 4305 - RNA, 19 nt, synthetic construct
  source 1..19: mol_type = other RNA
atgtagtcattgacactgg

SEQ ID NO: 4306 - RNA, 19 nt, synthetic construct
  source 1..19: mol_type = other RNA
tgtagtcattgacactgga

SEQ ID NO: 4307 - RNA, 19 nt, synthetic construct
  source 1..19: mol_type = other RNA
gtagtcattgacactggaa

SEQ ID NO: 4308 - RNA, 19 nt, synthetic construct
  source 1..19: mol_type = other RNA
tagtcattgacactggaat

SEQ ID NO: 4309 - RNA, 19 nt, synthetic construct
  source 1..19: mol_type = other RNA
agtcattgacactggaatg

SEQ ID NO: 4310 - RNA, 19 nt, synthetic construct
  source 1..19: mol_type = other RNA
gtcattgacactggaatgg

SEQ ID NO: 4311 - RNA, 19 nt, synthetic construct
  source 1..19: mol_type = other RNA
tcattgacactggaatggt

SEQ ID NO: 4312 - RNA, 19 nt, synthetic construct
  source 1..19: mol_type = other RNA
cattgacactggaatggta

SEQ ID NO: 4313 - RNA, 19 nt, synthetic construct
  source 1..19: mol_type = other RNA
attgacactggaatggtat

SEQ ID NO: 4314 - RNA, 19 nt, synthetic construct
  source 1..19: mol_type = other RNA
ttgacactggaatggtatt

SEQ ID NO: 4315 - RNA, 19 nt, synthetic construct
  source 1..19: mol_type = other RNA
tgacactggaatggtattt

SEQ ID NO: 4316 - RNA, 19 nt, synthetic construct
  source 1..19: mol_type = other RNA
gacactggaatggtatttg

SEQ ID NO: 4317 - RNA, 19 nt, synthetic construct
  source 1..19: mol_type = other RNA
acactggaatggtatttgt

SEQ ID NO: 4318 - RNA, 19 nt, synthetic construct
  source 1..19: mol_type = other RNA
cactggaatggtatttgta

SEQ ID NO: 4319 - RNA, 19 nt, synthetic construct
  source 1..19: mol_type = other RNA
actggaatggtatttgtaa

SEQ ID NO: 4320 - RNA, 19 nt, synthetic construct
  source 1..19: mol_type = other RNA
ctggaatggtatttgtaaa

SEQ ID NO: 4321 - RNA, 19 nt, synthetic construct
  source 1..19: mol_type = other RNA
tggaatggtatttgtaaag

SEQ ID NO: 4322 - RNA, 19 nt, synthetic construct
  source 1..19: mol_type = other RNA
ggaatggtatttgtaaagt

SEQ ID NO: 4323 - RNA, 19 nt, synthetic construct
  source 1..19: mol_type = other RNA
gaatggtatttgtaaagtt

SEQ ID NO: 4324 - RNA, 19 nt, synthetic construct
  source 1..19: mol_type = other RNA
aatggtatttgtaaagttt

SEQ ID NO: 4325 - RNA, 19 nt, synthetic construct
  source 1..19: mol_type = other RNA
atggtatttgtaaagtttt

SEQ ID NO: 4326 - RNA, 19 nt, synthetic construct
  source 1..19: mol_type = other RNA
tggtatttgtaaagttttt

SEQ ID NO: 4327 - RNA, 19 nt, synthetic construct
  source 1..19: mol_type = other RNA
ggtatttgtaaagtttttt

SEQ ID NO: 4328 - RNA, 19 nt, synthetic construct
  source 1..19: mol_type = other RNA
gtatttgtaaagttttttt

SEQ ID NO: 4329 - RNA, 19 nt, synthetic construct
  source 1..19: mol_type = other RNA
tatttgtaaagtttttttt

SEQ ID NO: 4330 - RNA, 19 nt, synthetic construct
  source 1..19: mol_type = other RNA
atttgtaaagttttttttt

SEQ ID NO: 4331 - RNA, 19 nt, synthetic construct
  source 1..19: mol_type = other RNA
tttgtaaagtttttttttt

SEQ ID NO: 4332 - RNA, 19 nt, synthetic construct
  source 1..19: mol_type = other RNA
ttgtaaagtttttttttta

SEQ ID NO: 4333 - RNA, 19 nt, synthetic construct
  source 1..19: mol_type = other RNA
tgtaaagttttttttttaa

SEQ ID NO: 4334 - RNA, 19 nt, synthetic construct
  source 1..19: mol_type = other RNA
gtaaagttttttttttaat

SEQ ID NO: 4335 - RNA, 19 nt, synthetic construct
  source 1..19: mol_type = other RNA
taaagttttttttttaatt

SEQ ID NO: 4336 - RNA, 19 nt, synthetic construct
  source 1..19: mol_type = other RNA
aaagttttttttttaattt

SEQ ID NO: 4337 - RNA, 19 nt, synthetic construct
  source 1..19: mol_type = other RNA
aagttttttttttaattta

SEQ ID NO: 4338 - RNA, 19 nt, synthetic construct
  source 1..19: mol_type = other RNA
agttttttttttaatttat

SEQ ID NO: 4339 - RNA, 19 nt, synthetic construct
  source 1..19: mol_type = other RNA
gttttttttttaatttatt

SEQ ID NO: 4340 - RNA, 19 nt, synthetic construct
  source 1..19: mol_type = other RNA
ttttttttttaatttattc

SEQ ID NO: 4341 - RNA, 19 nt, synthetic construct
  source 1..19: mol_type = other RNA
tttttttttaatttattca

SEQ ID NO: 4342 - RNA, 19 nt, synthetic construct
  source 1..19: mol_type = other RNA
ttttttttaatttattcaa

SEQ ID NO: 4343 - RNA, 19 nt, synthetic construct
  source 1..19: mol_type = other RNA
tttttttaatttattcaaa

SEQ ID NO: 4344 - RNA, 19 nt, synthetic construct
  source 1..19: mol_type = other RNA
ttttttaatttattcaaaa

SEQ ID NO: 4345 - RNA, 19 nt, synthetic construct
  source 1..19: mol_type = other RNA
tttttaatttattcaaaaa

SEQ ID NO: 4346 - RNA, 19 nt, synthetic construct
  source 1..19: mol_type = other RNA
ttttaatttattcaaaaaa

SEQ ID NO: 4347 - RNA, 19 nt, synthetic construct
  source 1..19: mol_type = other RNA
tttaatttattcaaaaaaa

SEQ ID NO: 4348 - RNA, 19 nt, synthetic construct
  source 1..19: mol_type = other RNA
ttaatttattcaaaaaaag

SEQ ID NO: 4349 - RNA, 19 nt, synthetic construct
  source 1..19: mol_type = other RNA
taatttattcaaaaaaaga

SEQ ID NO: 4350 - RNA, 19 nt, synthetic construct
  source 1..19: mol_type = other RNA
aatttattcaaaaaaagac

SEQ ID NO: 4351 - RNA, 19 nt, synthetic construct
  source 1..19: mol_type = other RNA
atttattcaaaaaaagaca

SEQ ID NO: 4352 - RNA, 19 nt, synthetic construct
  source 1..19: mol_type = other RNA
tttattcaaaaaaagacat

SEQ ID NO: 4353 - RNA, 19 nt, synthetic construct
  source 1..19: mol_type = other RNA
ttattcaaaaaaagacata

SEQ ID NO: 4354 - RNA, 19 nt, synthetic construct
  source 1..19: mol_type = other RNA
tattcaaaaaaagacatag

SEQ ID NO: 4355 - RNA, 19 nt, synthetic construct
  source 1..19: mol_type = other RNA
attcaaaaaaagacatagt

SEQ ID NO: 4356 - RNA, 19 nt, synthetic construct
  source 1..19: mol_type = other RNA
ttcaaaaaaagacatagta

SEQ ID NO: 4357 - RNA, 19 nt, synthetic construct
  source 1..19: mol_type = other RNA
tcaaaaaaagacatagtat

SEQ ID NO: 4358 - RNA, 19 nt, synthetic construct
  source 1..19: mol_type = other RNA
caaaaaaagacatagtatt

SEQ ID NO: 4359 - RNA, 19 nt, synthetic construct
  source 1..19: mol_type = other RNA
aaaaaaagacatagtattt

SEQ ID NO: 4360 - RNA, 19 nt, synthetic construct
  source 1..19: mol_type = other RNA
aaaaaagacatagtatttt

SEQ ID NO: 4361 - RNA, 19 nt, synthetic construct
  source 1..19: mol_type = other RNA
aaaaagacatagtatttta

SEQ ID NO: 4362 - RNA, 19 nt, synthetic construct
  source 1..19: mol_type = other RNA
aaaagacatagtattttag

SEQ ID NO: 4363 - RNA, 19 nt, synthetic construct
  source 1..19: mol_type = other RNA
aaagacatagtattttagt

SEQ ID NO: 4364 - RNA, 19 nt, synthetic construct
  source 1..19: mol_type = other RNA
aagacatagtattttagta

SEQ ID NO: 4365 - RNA, 19 nt, synthetic construct
  source 1..19: mol_type = other RNA
agacatagtattttagtac

SEQ ID NO: 4366 - RNA, 19 nt, synthetic construct
  source 1..19: mol_type = other RNA
gacatagtattttagtact

SEQ ID NO: 4367 - RNA, 19 nt, synthetic construct
  source 1..19: mol_type = other RNA
acatagtattttagtactt

SEQ ID NO: 4368 - RNA, 19 nt, synthetic construct
  source 1..19: mol_type = other RNA
catagtattttagtacttt

SEQ ID NO: 4369 - RNA, 19 nt, synthetic construct
  source 1..19: mol_type = other RNA
atagtattttagtactttt

SEQ ID NO: 4370 - RNA, 19 nt, synthetic construct
  source 1..19: mol_type = other RNA
tagtattttagtacttttt

SEQ ID NO: 4371 - RNA, 19 nt, synthetic construct
  source 1..19: mol_type = other RNA
agtattttagtacttttta

SEQ ID NO: 4372 - RNA, 19 nt, synthetic construct
  source 1..19: mol_type = other RNA
gtattttagtactttttac

SEQ ID NO: 4373 - RNA, 19 nt, synthetic construct
  source 1..19: mol_type = other RNA
tattttagtactttttaca

SEQ ID NO: 4374 - RNA, 19 nt, synthetic construct
  source 1..19: mol_type = other RNA
attttagtactttttacaa

SEQ ID NO: 4375 - RNA, 19 nt, synthetic construct
  source 1..19: mol_type = other RNA
ttttagtactttttacaaa

SEQ ID NO: 4376 - RNA, 19 nt, synthetic construct
  source 1..19: mol_type = other RNA
tttagtactttttacaaat

SEQ ID NO: 4377 - RNA, 19 nt, synthetic construct
  source 1..19: mol_type = other RNA
ttagtactttttacaaata

SEQ ID NO: 4378 - RNA, 19 nt, synthetic construct
  source 1..19: mol_type = other RNA
tagtactttttacaaataa

SEQ ID NO: 4379 - RNA, 19 nt, synthetic construct
  source 1..19: mol_type = other RNA
agtactttttacaaataat

SEQ ID NO: 4380 - RNA, 19 nt, synthetic construct
  source 1..19: mol_type = other RNA
gtactttttacaaataatg

SEQ ID NO: 4381 - RNA, 19 nt, synthetic construct
  source 1..19: mol_type = other RNA
tactttttacaaataatgc

SEQ ID NO: 4382 - RNA, 19 nt, synthetic construct
  source 1..19: mol_type = other RNA
actttttacaaataatgct

SEQ ID NO: 4383 - RNA, 19 nt, synthetic construct
  source 1..19: mol_type = other RNA
ctttttacaaataatgctc

SEQ ID NO: 4384 - RNA, 19 nt, synthetic construct
  source 1..19: mol_type = other RNA
tttttacaaataatgctct

SEQ ID NO: 4385 - RNA, 19 nt, synthetic construct
  source 1..19: mol_type = other RNA
ttttacaaataatgctctt

SEQ ID NO: 4386 - RNA, 19 nt, synthetic construct
  source 1..19: mol_type = other RNA
tttacaaataatgctctta

SEQ ID NO: 4387 - RNA, 19 nt, synthetic construct
  source 1..19: mol_type = other RNA
ttacaaataatgctcttac

SEQ ID NO: 4388 - RNA, 19 nt, synthetic construct
  source 1..19: mol_type = other RNA
tacaaataatgctcttaca

SEQ ID NO: 4389 - RNA, 19 nt, synthetic construct
  source 1..19: mol_type = other RNA
acaaataatgctcttacaa

SEQ ID NO: 4390 - RNA, 19 nt, synthetic construct
  source 1..19: mol_type = other RNA
caaataatgctcttacaaa

SEQ ID NO: 4391 - RNA, 19 nt, synthetic construct
  source 1..19: mol_type = other RNA
aaataatgctcttacaaaa

SEQ ID NO: 4392 - RNA, 19 nt, synthetic construct
  source 1..19: mol_type = other RNA
aataatgctcttacaaaaa

SEQ ID NO: 4393 - RNA, 19 nt, synthetic construct
  source 1..19: mol_type = other RNA
ataatgctcttacaaaaat

SEQ ID NO: 4394 - RNA, 19 nt, synthetic construct
  source 1..19: mol_type = other RNA
taatgctcttacaaaaatg

SEQ ID NO: 4395 - RNA, 19 nt, synthetic construct
  source 1..19: mol_type = other RNA
aatgctcttacaaaaatgc

SEQ ID NO: 4396 - RNA, 19 nt, synthetic construct
  source 1..19: mol_type = other RNA
atgctcttacaaaaatgct

SEQ ID NO: 4397 - RNA, 19 nt, synthetic construct
  source 1..19: mol_type = other RNA
tgctcttacaaaaatgcta

SEQ ID NO: 4398 - RNA, 19 nt, synthetic construct
  source 1..19: mol_type = other RNA
gctcttacaaaaatgctac

SEQ ID NO: 4399 - RNA, 19 nt, synthetic construct
  source 1..19: mol_type = other RNA
ctcttacaaaaatgctact

SEQ ID NO: 4400 - RNA, 19 nt, synthetic construct
  source 1..19: mol_type = other RNA
tcttacaaaaatgctactg

SEQ ID NO: 4401 - RNA, 19 nt, synthetic construct
  source 1..19: mol_type = other RNA
cttacaaaaatgctactga

SEQ ID NO: 4402 - RNA, 19 nt, synthetic construct
  source 1..19: mol_type = other RNA
ttacaaaaatgctactgat

SEQ ID NO: 4403 - RNA, 19 nt, synthetic construct
  source 1..19: mol_type = other RNA
tacaaaaatgctactgatc

SEQ ID NO: 4404 - RNA, 19 nt, synthetic construct
  source 1..19: mol_type = other RNA
acaaaaatgctactgatca

SEQ ID NO: 4405 - RNA, 19 nt, synthetic construct
  source 1..19: mol_type = other RNA
caaaaatgctactgatcaa

SEQ ID NO: 4406 - RNA, 19 nt, synthetic construct
  source 1..19: mol_type = other RNA
aaaaatgctactgatcaaa

SEQ ID NO: 4407 - RNA, 19 nt, synthetic construct
  source 1..19: mol_type = other RNA
aaaatgctactgatcaaat

SEQ ID NO: 4408 - RNA, 19 nt, synthetic construct
  source 1..19: mol_type = other RNA
aaatgctactgatcaaata

SEQ ID NO: 4409 - RNA, 19 nt, synthetic construct
  source 1..19: mol_type = other RNA
aatgctactgatcaaataa

SEQ ID NO: 4410 - RNA, 19 nt, synthetic construct
  source 1..19: mol_type = other RNA
atgctactgatcaaataag

SEQ ID NO: 4411 - RNA, 19 nt, synthetic construct
  source 1..19: mol_type = other RNA
tgctactgatcaaataagc

SEQ ID NO: 4412 - RNA, 19 nt, synthetic construct
  source 1..19: mol_type = other RNA
gctactgatcaaataagct

SEQ ID NO: 4413 - RNA, 19 nt, synthetic construct
  source 1..19: mol_type = other RNA
ctactgatcaaataagctt

SEQ ID NO: 4414 - RNA, 19 nt, synthetic construct
  source 1..19: mol_type = other RNA
tactgatcaaataagcttt

SEQ ID NO: 4415 - RNA, 19 nt, synthetic construct
  source 1..19: mol_type = other RNA
actgatcaaataagctttt

SEQ ID NO: 4416 - RNA, 19 nt, synthetic construct
  source 1..19: mol_type = other RNA
ctgatcaaataagctttta

SEQ ID NO: 4417 - RNA, 19 nt, synthetic construct
  source 1..19: mol_type = other RNA
tgatcaaataagcttttaa

SEQ ID NO: 4418 - RNA, 19 nt, synthetic construct
  source 1..19: mol_type = other RNA
gatcaaataagcttttaag

SEQ ID NO: 4419 - RNA, 19 nt, synthetic construct
  source 1..19: mol_type = other RNA
atcaaataagcttttaaga

SEQ ID NO: 4420 - RNA, 19 nt, synthetic construct
  source 1..19: mol_type = other RNA
tcaaataagcttttaagaa

SEQ ID NO: 4421 - RNA, 19 nt, synthetic construct
  source 1..19: mol_type = other RNA
caaataagcttttaagaat

SEQ ID NO: 4422 - RNA, 19 nt, synthetic construct
  source 1..19: mol_type = other RNA
aaataagcttttaagaatt

SEQ ID NO: 4423 - RNA, 19 nt, synthetic construct
  source 1..19: mol_type = other RNA
aataagcttttaagaattg

SEQ ID NO: 4424 - RNA, 19 nt, synthetic construct
  source 1..19: mol_type = other RNA
ataagcttttaagaattgg

SEQ ID NO: 4425 - RNA, 19 nt, synthetic construct
  source 1..19: mol_type = other RNA
taagcttttaagaattgga

SEQ ID NO: 4426 - RNA, 19 nt, synthetic construct
  source 1..19: mol_type = other RNA
aagcttttaagaattggaa

SEQ ID NO: 4427 - RNA, 19 nt, synthetic construct
  source 1..19: mol_type = other RNA
agcttttaagaattggaaa

SEQ ID NO: 4428 - RNA, 19 nt, synthetic construct
  source 1..19: mol_type = other RNA
gcttttaagaattggaaaa

SEQ ID NO: 4429 - RNA, 19 nt, synthetic construct
  source 1..19: mol_type = other RNA
cttttaagaattggaaaaa

SEQ ID NO: 4430 - RNA, 19 nt, synthetic construct
  source 1..19: mol_type = other RNA
ttttaagaattggaaaaat

SEQ ID NO: 4431 - RNA, 19 nt, synthetic construct
  source 1..19: mol_type = other RNA
tttaagaattggaaaaata

SEQ ID NO: 4432 - RNA, 19 nt, synthetic construct
  source 1..19: mol_type = other RNA
ttaagaattggaaaaataa

SEQ ID NO: 4433 - RNA, 19 nt, synthetic construct
  source 1..19: mol_type = other RNA
taagaattggaaaaataaa

SEQ ID NO: 4434 - RNA, 19 nt, synthetic construct
  source 1..19: mol_type = other RNA
aagaattggaaaaataaaa

SEQ ID NO: 4435 - RNA, 19 nt, synthetic construct
  source 1..19: mol_type = other RNA
agaattggaaaaataaaaa

SEQ ID NO: 4436 - RNA, 19 nt, synthetic construct
  source 1..19: mol_type = other RNA
gaattggaaaaataaaaat

SEQ ID NO: 4437 - RNA, 19 nt, synthetic construct
  source 1..19: mol_type = other RNA
aattggaaaaataaaaata

SEQ ID NO: 4438 - RNA, 19 nt, synthetic construct
  source 1..19: mol_type = other RNA
attggaaaaataaaaatac

SEQ ID NO: 4439 - RNA, 19 nt, synthetic construct
  source 1..19: mol_type = other RNA
ttggaaaaataaaaataca

SEQ ID NO: 4440 - RNA, 19 nt, synthetic construct
  source 1..19: mol_type = other RNA
tggaaaaataaaaatacaa

SEQ ID NO: 4441 - RNA, 19 nt, synthetic construct
  source 1..19: mol_type = other RNA
ggaaaaataaaaatacaaa

SEQ ID NO: 4442 - RNA, 19 nt, synthetic construct
  source 1..19: mol_type = other RNA
gaaaaataaaaatacaaaa

SEQ ID NO: 4443 - RNA, 19 nt, synthetic construct
  source 1..19: mol_type = other RNA
aaaaataaaaatacaaaag

SEQ ID NO: 4444 - RNA, 19 nt, synthetic construct
  source 1..19: mol_type = other RNA
aaaataaaaatacaaaagt

SEQ ID NO: 4445 - RNA, 19 nt, synthetic construct
  source 1..19: mol_type = other RNA
aaataaaaatacaaaagtc

SEQ ID NO: 4446 - RNA, 19 nt, synthetic construct
  source 1..19: mol_type = other RNA
aataaaaatacaaaagtcc

SEQ ID NO: 4447 - RNA, 19 nt, synthetic construct
  source 1..19: mol_type = other RNA
ataaaaatacaaaagtcct

SEQ ID NO: 4448 - RNA, 19 nt, synthetic construct
  source 1..19: mol_type = other RNA
taaaaatacaaaagtcctt

SEQ ID NO: 4449 - RNA, 19 nt, synthetic construct
  source 1..19: mol_type = other RNA
aaaaatacaaaagtccttc

SEQ ID NO: 4450 - RNA, 19 nt, synthetic construct
  source 1..19: mol_type = other RNA
aaaatacaaaagtccttca

SEQ ID NO: 4451 - RNA, 19 nt, synthetic construct
  source 1..19: mol_type = other RNA
aaatacaaaagtccttcac

SEQ ID NO: 4452 - RNA, 19 nt, synthetic construct
  source 1..19: mol_type = other RNA
aatacaaaagtccttcacc

SEQ ID NO: 4453 - RNA, 19 nt, synthetic construct
  source 1..19: mol_type = other RNA
atacaaaagtccttcacca

SEQ ID NO: 4454 - RNA, 19 nt, synthetic construct
  source 1..19: mol_type = other RNA
tacaaaagtccttcaccat

SEQ ID NO: 4455 - RNA, 19 nt, synthetic construct
  source 1..19: mol_type = other RNA
acaaaagtccttcaccatt

SEQ ID NO: 4456 - RNA, 19 nt, synthetic construct
  source 1..19: mol_type = other RNA
caaaagtccttcaccatta

SEQ ID NO: 4457 - RNA, 19 nt, synthetic construct
  source 1..19: mol_type = other RNA
aaaagtccttcaccattat

SEQ ID NO: 4458 - RNA, 19 nt, synthetic construct
  source 1..19: mol_type = other RNA
aaagtccttcaccattatc

SEQ ID NO: 4459 - RNA, 19 nt, synthetic construct
  source 1..19: mol_type = other RNA
aagtccttcaccattatcc

SEQ ID NO: 4460 - RNA, 19 nt, synthetic construct
  source 1..19: mol_type = other RNA
agtccttcaccattatcct

SEQ ID NO: 4461 - RNA, 19 nt, synthetic construct
  source 1..19: mol_type = other RNA
gtccttcaccattatcctc

SEQ ID NO: 4462 - RNA, 19 nt, synthetic construct
  source 1..19: mol_type = other RNA
tccttcaccattatcctca

SEQ ID NO: 4463 - RNA, 19 nt, synthetic construct
  source 1..19: mol_type = other RNA
ccttcaccattatcctcag

SEQ ID NO: 4464 - RNA, 19 nt, synthetic construct
  source 1..19: mol_type = other RNA
cttcaccattatcctcagg

SEQ ID NO: 4465 - RNA, 19 nt, synthetic construct
  source 1..19: mol_type = other RNA
ttcaccattatcctcaggt

SEQ ID NO: 4466 - RNA, 19 nt, synthetic construct
  source 1..19: mol_type = other RNA
tcaccattatcctcaggtg

SEQ ID NO: 4467 - RNA, 19 nt, synthetic construct
  source 1..19: mol_type = other RNA
caccattatcctcaggtga

SEQ ID NO: 4468 - RNA, 19 nt, synthetic construct
  source 1..19: mol_type = other RNA
accattatcctcaggtgat

SEQ ID NO: 4469 - RNA, 19 nt, synthetic construct
  source 1..19: mol_type = other RNA
ccattatcctcaggtgatc

SEQ ID NO: 4470 - RNA, 19 nt, synthetic construct
  source 1..19: mol_type = other RNA
cattatcctcaggtgatca

SEQ ID NO: 4471 - RNA, 19 nt, synthetic construct
  source 1..19: mol_type = other RNA
attatcctcaggtgatcag

SEQ ID NO: 4472 - RNA, 19 nt, synthetic construct
  source 1..19: mol_type = other RNA
ttatcctcaggtgatcagt

SEQ ID NO: 4473 - RNA, 19 nt, synthetic construct
  source 1..19: mol_type = other RNA
tatcctcaggtgatcagta

SEQ ID NO: 4474 - RNA, 19 nt, synthetic construct
  source 1..19: mol_type = other RNA
atcctcaggtgatcagtag

SEQ ID NO: 4475 - RNA, 19 nt, synthetic construct
  source 1..19: mol_type = other RNA
tcctcaggtgatcagtagc

SEQ ID NO: 4476 - RNA, 19 nt, synthetic construct
  source 1..19: mol_type = other RNA
cctcaggtgatcagtagca

SEQ ID NO: 4477 - RNA, 19 nt, synthetic construct
  source 1..19: mol_type = other RNA
ctcaggtgatcagtagcat

SEQ ID NO: 4478 - RNA, 19 nt, synthetic construct
  source 1..19: mol_type = other RNA
tcaggtgatcagtagcatt

SEQ ID NO: 4479 - RNA, 19 nt, synthetic construct
  source 1..19: mol_type = other RNA
caggtgatcagtagcattg

SEQ ID NO: 4480 - RNA, 19 nt, synthetic construct
  source 1..19: mol_type = other RNA
aggtgatcagtagcattgc

SEQ ID NO: 4481 - RNA, 19 nt, synthetic construct
  source 1..19: mol_type = other RNA
ggtgatcagtagcattgcc

SEQ ID NO: 4482 - RNA, 19 nt, synthetic construct
  source 1..19: mol_type = other RNA
gtgatcagtagcattgcct

SEQ ID NO: 4483 - RNA, 19 nt, synthetic construct
  source 1..19: mol_type = other RNA
tgatcagtagcattgcctt

SEQ ID NO: 4484 - RNA, 19 nt, synthetic construct
  source 1..19: mol_type = other RNA
gatcagtagcattgccttg

SEQ ID NO: 4485 - RNA, 19 nt, synthetic construct
  source 1..19: mol_type = other RNA
atcagtagcattgccttgt

SEQ ID NO: 4486 - RNA, 19 nt, synthetic construct
  source 1..19: mol_type = other RNA
tcagtagcattgccttgtc

SEQ ID NO: 4487 - RNA, 19 nt, synthetic construct
  source 1..19: mol_type = other RNA
cagtagcattgccttgtct

SEQ ID NO: 4488 - RNA, 19 nt, synthetic construct
  source 1..19: mol_type = other RNA
agtagcattgccttgtctt

SEQ ID NO: 4489 - RNA, 19 nt, synthetic construct
  source 1..19: mol_type = other RNA
gtagcattgccttgtcttg

SEQ ID NO: 4490 - RNA, 19 nt, synthetic construct
  source 1..19: mol_type = other RNA
tagcattgccttgtcttgg

SEQ ID NO: 4491 - RNA, 19 nt, synthetic construct
  source 1..19: mol_type = other RNA
agcattgccttgtcttgga

SEQ ID NO: 4492 - RNA, 19 nt, synthetic construct
  source 1..19: mol_type = other RNA
gcattgccttgtcttggat

SEQ ID NO: 4493 - RNA, 19 nt, synthetic construct
  source 1..19: mol_type = other RNA
cattgccttgtcttggatc

SEQ ID NO: 4494 - RNA, 19 nt, synthetic construct
  source 1..19: mol_type = other RNA
attgccttgtcttggatcc

SEQ ID NO: 4495 - RNA, 19 nt, synthetic construct
  source 1..19: mol_type = other RNA
ttgccttgtcttggatcct

SEQ ID NO: 4496 - RNA, 19 nt, synthetic construct
  source 1..19: mol_type = other RNA
tgccttgtcttggatcctc

SEQ ID NO: 4497 - RNA, 19 nt, synthetic construct
  source 1..19: mol_type = other RNA
gccttgtcttggatcctca

SEQ ID NO: 4498 - RNA, 19 nt, synthetic construct
  source 1..19: mol_type = other RNA
ccttgtcttggatcctcag

SEQ ID NO: 4499 - RNA, 19 nt, synthetic construct
  source 1..19: mol_type = other RNA
cttgtcttggatcctcagt

SEQ ID NO: 4500 - RNA, 19 nt, synthetic construct
  source 1..19: mol_type = other RNA
ttgtcttggatcctcagtg

SEQ ID NO: 4501 - RNA, 19 nt, synthetic construct
  source 1..19: mol_type = other RNA
tgtcttggatcctcagtgc

SEQ ID NO: 4502 - RNA, 19 nt, synthetic construct
  source 1..19: mol_type = other RNA
gtcttggatcctcagtgct

SEQ ID NO: 4503 - RNA, 19 nt, synthetic construct
  source 1..19: mol_type = other RNA
tcttggatcctcagtgctg

SEQ ID NO: 4504 - RNA, 19 nt, synthetic construct
  source 1..19: mol_type = other RNA
cttggatcctcagtgctgc

SEQ ID NO: 4505 - RNA, 19 nt, synthetic construct
  source 1..19: mol_type = other RNA
ttggatcctcagtgctgcc

SEQ ID NO: 4506 - RNA, 19 nt, synthetic construct
  source 1..19: mol_type = other RNA
tggatcctcagtgctgcca

SEQ ID NO: 4507 - RNA, 19 nt, synthetic construct
  source 1..19: mol_type = other RNA
ggatcctcagtgctgccaa

SEQ ID NO: 4508 - RNA, 19 nt, synthetic construct
  source 1..19: mol_type = other RNA
gatcctcagtgctgccaaa

SEQ ID NO: 4509 - RNA, 19 nt, synthetic construct
  source 1..19: mol_type = other RNA
atcctcagtgctgccaaaa

SEQ ID NO: 4510 - RNA, 19 nt, synthetic construct
  source 1..19: mol_type = other RNA
tcctcagtgctgccaaaag

SEQ ID NO: 4511 - RNA, 19 nt, synthetic construct
  source 1..19: mol_type = other RNA
cctcagtgctgccaaaagg

SEQ ID NO: 4512 - RNA, 19 nt, synthetic construct
  source 1..19: mol_type = other RNA
ctcagtgctgccaaaaggc

SEQ ID NO: 4513 - RNA, 19 nt, synthetic construct
  source 1..19: mol_type = other RNA
tcagtgctgccaaaaggcc

SEQ ID NO: 4514 - RNA, 19 nt, synthetic construct
  source 1..19: mol_type = other RNA
cagtgctgccaaaaggcca

SEQ ID NO: 4515 - RNA, 19 nt, synthetic construct
  source 1..19: mol_type = other RNA
agtgctgccaaaaggccag

SEQ ID NO: 4516 - RNA, 19 nt, synthetic construct
  source 1..19: mol_type = other RNA
gtgctgccaaaaggccagt

SEQ ID NO: 4517 - RNA, 19 nt, synthetic construct
  source 1..19: mol_type = other RNA
tgctgccaaaaggccagta

SEQ ID NO: 4518 - RNA, 19 nt, synthetic construct
  source 1..19: mol_type = other RNA
gctgccaaaaggccagtat

SEQ ID NO: 4519 - RNA, 19 nt, synthetic construct
  source 1..19: mol_type = other RNA
ctgccaaaaggccagtata

SEQ ID NO: 4520 - RNA, 19 nt, synthetic construct
  source 1..19: mol_type = other RNA
tgccaaaaggccagtataa

SEQ ID NO: 4521 - RNA, 19 nt, synthetic construct
  source 1..19: mol_type = other RNA
gccaaaaggccagtataaa

SEQ ID NO: 4522 - RNA, 19 nt, synthetic construct
  source 1..19: mol_type = other RNA
ccaaaaggccagtataaag

SEQ ID NO: 4523 - RNA, 19 nt, synthetic construct
  source 1..19: mol_type = other RNA
caaaaggccagtataaaga

SEQ ID NO: 4524 - RNA, 19 nt, synthetic construct
  source 1..19: mol_type = other RNA
aaaaggccagtataaagaa

SEQ ID NO: 4525 - RNA, 19 nt, synthetic construct
  source 1..19: mol_type = other RNA
aaaggccagtataaagaat

SEQ ID NO: 4526 - RNA, 19 nt, synthetic construct
  source 1..19: mol_type = other RNA
aaggccagtataaagaatt

SEQ ID NO: 4527 - RNA, 19 nt, synthetic construct
  source 1..19: mol_type = other RNA
aggccagtataaagaattt

SEQ ID NO: 4528 - RNA, 19 nt, synthetic construct
  source 1..19: mol_type = other RNA
ggccagtataaagaattta

SEQ ID NO: 4529 - RNA, 19 nt, synthetic construct
  source 1..19: mol_type = other RNA
gccagtataaagaatttat

SEQ ID NO: 4530 - RNA, 19 nt, synthetic construct
  source 1..19: mol_type = other RNA
ccagtataaagaatttata

SEQ ID NO: 4531 - RNA, 19 nt, synthetic construct
  source 1..19: mol_type = other RNA
cagtataaagaatttatat

SEQ ID NO: 4532 - RNA, 19 nt, synthetic construct
  source 1..19: mol_type = other RNA
agtataaagaatttatatt

SEQ ID NO: 4533 - RNA, 19 nt, synthetic construct
  source 1..19: mol_type = other RNA
gtataaagaatttatattt

SEQ ID NO: 4534 - RNA, 19 nt, synthetic construct
  source 1..19: mol_type = other RNA
tataaagaatttatatttg

SEQ ID NO: 4535 - RNA, 19 nt, synthetic construct
  source 1..19: mol_type = other RNA
ataaagaatttatatttgc

SEQ ID NO: 4536 - RNA, 19 nt, synthetic construct
  source 1..19: mol_type = other RNA
taaagaatttatatttgca

SEQ ID NO: 4537 - RNA, 19 nt, synthetic construct
  source 1..19: mol_type = other RNA
aaagaatttatatttgcac

SEQ ID NO: 4538 - RNA, 19 nt, synthetic construct
  source 1..19: mol_type = other RNA
aagaatttatatttgcact

SEQ ID NO: 4539 - RNA, 19 nt, synthetic construct
  source 1..19: mol_type = other RNA
agaatttatatttgcactg

SEQ ID NO: 4540 - RNA, 19 nt, synthetic construct
  source 1..19: mol_type = other RNA
gaatttatatttgcactgt

SEQ ID NO: 4541 - RNA, 19 nt, synthetic construct
  source 1..19: mol_type = other RNA
aatttatatttgcactgta

SEQ ID NO: 4542 - RNA, 19 nt, synthetic construct
  source 1..19: mol_type = other RNA
atttatatttgcactgtaa

SEQ ID NO: 4543 - RNA, 19 nt, synthetic construct
  source 1..19: mol_type = other RNA
tttatatttgcactgtaaa

SEQ ID NO: 4544 - RNA, 19 nt, synthetic construct
  source 1..19: mol_type = other RNA
ttatatttgcactgtaaac

SEQ ID NO: 4545 - RNA, 19 nt, synthetic construct
  source 1..19: mol_type = other RNA
tatatttgcactgtaaact

SEQ ID NO: 4546 - RNA, 19 nt, synthetic construct
  source 1..19: mol_type = other RNA
atatttgcactgtaaactc

SEQ ID NO: 4547 - RNA, 19 nt, synthetic construct
  source 1..19: mol_type = other RNA
tatttgcactgtaaactct

SEQ ID NO: 4548 - RNA, 19 nt, synthetic construct
  source 1..19: mol_type = other RNA
atttgcactgtaaactctg

SEQ ID NO: 4549 - RNA, 19 nt, synthetic construct
  source 1..19: mol_type = other RNA
tttgcactgtaaactctgc

SEQ ID NO: 4550 - RNA, 19 nt, synthetic construct
  source 1..19: mol_type = other RNA
ttgcactgtaaactctgca

SEQ ID NO: 4551 - RNA, 19 nt, synthetic construct
  source 1..19: mol_type = other RNA
tgcactgtaaactctgcaa

SEQ ID NO: 4552 - RNA, 19 nt, synthetic construct
  source 1..19: mol_type = other RNA
gcactgtaaactctgcaaa

SEQ ID NO: 4553 - RNA, 19 nt, synthetic construct
  source 1..19: mol_type = other RNA
cactgtaaactctgcaaaa

SEQ ID NO: 4554 - RNA, 19 nt, synthetic construct
  source 1..19: mol_type = other RNA
actgtaaactctgcaaaaa

SEQ ID NO: 4555 - RNA, 19 nt, synthetic construct
  source 1..19: mol_type = other RNA
ctgtaaactctgcaaaaat

SEQ ID NO: 4556 - RNA, 19 nt, synthetic construct
  source 1..19: mol_type = other RNA
tgtaaactctgcaaaaata

SEQ ID NO: 4557 - RNA, 19 nt, synthetic construct
  source 1..19: mol_type = other RNA
gtaaactctgcaaaaatat

SEQ ID NO: 4558 - RNA, 19 nt, synthetic construct
  source 1..19: mol_type = other RNA
taaactctgcaaaaatatg

SEQ ID NO: 4559 - RNA, 19 nt, synthetic construct
  source 1..19: mol_type = other RNA
aaactctgcaaaaatatgg

SEQ ID NO: 4560 - RNA, 19 nt, synthetic construct
  source 1..19: mol_type = other RNA
aactctgcaaaaatatggt

SEQ ID NO: 4561 - RNA, 19 nt, synthetic construct
  source 1..19: mol_type = other RNA
actctgcaaaaatatggtt

SEQ ID NO: 4562 - RNA, 19 nt, synthetic construct
  source 1..19: mol_type = other RNA
ctctgcaaaaatatggttt

SEQ ID NO: 4563 - RNA, 19 nt, synthetic construct
  source 1..19: mol_type = other RNA
tctgcaaaaatatggttta

SEQ ID NO: 4564 - RNA, 19 nt, synthetic construct
  source 1..19: mol_type = other RNA
ctgcaaaaatatggtttaa

SEQ ID NO: 4565 - RNA, 19 nt, synthetic construct
  source 1..19: mol_type = other RNA
tgcaaaaatatggtttaaa

SEQ ID NO: 4566 - RNA, 19 nt, synthetic construct
  source 1..19: mol_type = other RNA
gcaaaaatatggtttaaag

SEQ ID NO: 4567 - RNA, 19 nt, synthetic construct
  source 1..19: mol_type = other RNA
caaaaatatggtttaaagt

SEQ ID NO: 4568 - RNA, 19 nt, synthetic construct
  source 1..19: mol_type = other RNA
aaaaatatggtttaaagtg

SEQ ID NO: 4569 - RNA, 19 nt, synthetic construct
  source 1..19: mol_type = other RNA
aaaatatggtttaaagtga

SEQ ID NO: 4570 - RNA, 19 nt, synthetic construct
  source 1..19: mol_type = other RNA
aaatatggtttaaagtgac

SEQ ID NO: 4571 - RNA, 19 nt, synthetic construct
  source 1..19: mol_type = other RNA
aatatggtttaaagtgaca

SEQ ID NO: 4572 - RNA, 19 nt, synthetic construct
  source 1..19: mol_type = other RNA
atatggtttaaagtgacat

SEQ ID NO: 4573 - RNA, 19 nt, synthetic construct
  source 1..19: mol_type = other RNA
tatggtttaaagtgacatg

SEQ ID NO: 4574 - RNA, 19 nt, synthetic construct
  source 1..19: mol_type = other RNA
atggtttaaagtgacatga

SEQ ID NO: 4575 - RNA, 19 nt, synthetic construct
  source 1..19: mol_type = other RNA
tggtttaaagtgacatgat

SEQ ID NO: 4576 - RNA, 19 nt, synthetic construct
  source 1..19: mol_type = other RNA
ggtttaaagtgacatgatt

SEQ ID NO: 4577 - RNA, 19 nt, synthetic construct
  source 1..19: mol_type = other RNA
gtttaaagtgacatgattg

SEQ ID NO: 4578 - RNA, 19 nt, synthetic construct
  source 1..19: mol_type = other RNA
tttaaagtgacatgattgc

SEQ ID NO: 4579 - RNA, 19 nt, synthetic construct
  source 1..19: mol_type = other RNA
ttaaagtgacatgattgca

SEQ ID NO: 4580 - RNA, 19 nt, synthetic construct
  source 1..19: mol_type = other RNA
taaagtgacatgattgcac

SEQ ID NO: 4581 - RNA, 19 nt, synthetic construct
  source 1..19: mol_type = other RNA
aaagtgacatgattgcact

SEQ ID NO: 4582 - RNA, 19 nt, synthetic construct
  source 1..19: mol_type = other RNA
aagtgacatgattgcactg

SEQ ID NO: 4583 - RNA, 19 nt, synthetic construct
  source 1..19: mol_type = other RNA
agtgacatgattgcactga

SEQ ID NO: 4584 - RNA, 19 nt, synthetic construct
  source 1..19: mol_type = other RNA
gtgacatgattgcactgaa

SEQ ID NO: 4585 - RNA, 19 nt, synthetic construct
  source 1..19: mol_type = other RNA
tgacatgattgcactgaaa

SEQ ID NO: 4586 - RNA, 19 nt, synthetic construct
  source 1..19: mol_type = other RNA
gacatgattgcactgaaaa

SEQ ID NO: 4587 - RNA, 19 nt, synthetic construct
  source 1..19: mol_type = other RNA
acatgattgcactgaaaag

SEQ ID NO: 4588 - RNA, 19 nt, synthetic construct
  source 1..19: mol_type = other RNA
catgattgcactgaaaagg

SEQ ID NO: 4589 - RNA, 19 nt, synthetic construct
  source 1..19: mol_type = other RNA
atgattgcactgaaaaggg

SEQ ID NO: 4590 - RNA, 19 nt, synthetic construct
  source 1..19: mol_type = other RNA
tgattgcactgaaaaggga

SEQ ID NO: 4591 - RNA, 19 nt, synthetic construct
  source 1..19: mol_type = other RNA
gattgcactgaaaagggat

SEQ ID NO: 4592 - RNA, 19 nt, synthetic construct
  source 1..19: mol_type = other RNA
attgcactgaaaagggata

SEQ ID NO: 4593 - RNA, 19 nt, synthetic construct
  source 1..19: mol_type = other RNA
ttgcactgaaaagggatag

SEQ ID NO: 4594 - RNA, 19 nt, synthetic construct
  source 1..19: mol_type = other RNA
tgcactgaaaagggatagt

SEQ ID NO: 4595 - RNA, 19 nt, synthetic construct
  source 1..19: mol_type = other RNA
gcactgaaaagggatagtg

SEQ ID NO: 4596 - RNA, 19 nt, synthetic construct
  source 1..19: mol_type = other RNA
cactgaaaagggatagtgc

SEQ ID NO: 4597 - RNA, 19 nt, synthetic construct
  source 1..19: mol_type = other RNA
actgaaaagggatagtgct

SEQ ID NO: 4598 - RNA, 19 nt, synthetic construct
  source 1..19: mol_type = other RNA
ctgaaaagggatagtgctt

SEQ ID NO: 4599 - RNA, 19 nt, synthetic construct
  source 1..19: mol_type = other RNA
tgaaaagggatagtgcttt

SEQ ID NO: 4600 - RNA, 19 nt, synthetic construct
  source 1..19: mol_type = other RNA
gaaaagggatagtgctttt

SEQ ID NO: 4601 - RNA, 19 nt, synthetic construct
  source 1..19: mol_type = other RNA
aaaagggatagtgcttttg

SEQ ID NO: 4602 - RNA, 19 nt, synthetic construct
  source 1..19: mol_type = other RNA
aaagggatagtgcttttgt

SEQ ID NO: 4603 - RNA, 19 nt, synthetic construct
  source 1..19: mol_type = other RNA
aagggatagtgcttttgtg

SEQ ID NO: 4604 - RNA, 19 nt, synthetic construct
  source 1..19: mol_type = other RNA
agggatagtgcttttgtga

SEQ ID NO: 4605 - RNA, 19 nt, synthetic construct
  source 1..19: mol_type = other RNA
gggatagtgcttttgtgaa

SEQ ID NO: 4606 - RNA, 19 nt, synthetic construct
  source 1..19: mol_type = other RNA
ggatagtgcttttgtgaaa

SEQ ID NO: 4607 - RNA, 19 nt, synthetic construct
  source 1..19: mol_type = other RNA
gatagtgcttttgtgaaat

SEQ ID NO: 4608 - RNA, 19 nt, synthetic construct
  source 1..19: mol_type = other RNA
atagtgcttttgtgaaatt

SEQ ID NO: 4609 - RNA, 19 nt, synthetic construct
  source 1..19: mol_type = other RNA
tagtgcttttgtgaaattt

SEQ ID NO: 4610 - RNA, 19 nt, synthetic construct
  source 1..19: mol_type = other RNA
agtgcttttgtgaaatttt

SEQ ID NO: 4611 - RNA, 19 nt, synthetic construct
  source 1..19: mol_type = other RNA
gtgcttttgtgaaattttt

SEQ ID NO: 4612 - RNA, 19 nt, synthetic construct
  source 1..19: mol_type = other RNA
tgcttttgtgaaatttttc

SEQ ID NO: 4613 - RNA, 19 nt, synthetic construct
  source 1..19: mol_type = other RNA
gcttttgtgaaatttttca

SEQ ID NO: 4614 - RNA, 19 nt, synthetic construct
  source 1..19: mol_type = other RNA
cttttgtgaaatttttcaa

SEQ ID NO: 4615 - RNA, 19 nt, synthetic construct
  source 1..19: mol_type = other RNA
ttttgtgaaatttttcaaa

SEQ ID NO: 4616 - RNA, 19 nt, synthetic construct
  source 1..19: mol_type = other RNA
tttgtgaaatttttcaaat

SEQ ID NO: 4617 - RNA, 19 nt, synthetic construct
  source 1..19: mol_type = other RNA
ttgtgaaatttttcaaatt

SEQ ID NO: 4618 - RNA, 19 nt, synthetic construct
  source 1..19: mol_type = other RNA
tgtgaaatttttcaaattt

SEQ ID NO: 4619 - RNA, 19 nt, synthetic construct
  source 1..19: mol_type = other RNA
gtgaaatttttcaaatttg

SEQ ID NO: 4620 - RNA, 19 nt, synthetic construct
  source 1..19: mol_type = other RNA
tgaaatttttcaaatttga

SEQ ID NO: 4621 - RNA, 19 nt, synthetic construct
  source 1..19: mol_type = other RNA
gaaatttttcaaatttgag

SEQ ID NO: 4622 - RNA, 19 nt, synthetic construct
  source 1..19: mol_type = other RNA
aaatttttcaaatttgagt

SEQ ID NO: 4623 - RNA, 19 nt, synthetic construct
  source 1..19: mol_type = other RNA
aatttttcaaatttgagta

SEQ ID NO: 4624 - RNA, 19 nt, synthetic construct
  source 1..19: mol_type = other RNA
atttttcaaatttgagtaa

SEQ ID NO: 4625 - RNA, 19 nt, synthetic construct
  source 1..19: mol_type = other RNA
tttttcaaatttgagtaat

SEQ ID NO: 4626 - RNA, 19 nt, synthetic construct
  source 1..19: mol_type = other RNA
ttttcaaatttgagtaata

SEQ ID NO: 4627 - RNA, 19 nt, synthetic construct
  source 1..19: mol_type = other RNA
tttcaaatttgagtaatag

SEQ ID NO: 4628 - RNA, 19 nt, synthetic construct
  source 1..19: mol_type = other RNA
ttcaaatttgagtaataga

SEQ ID NO: 4629 - RNA, 19 nt, synthetic construct
  source 1..19: mol_type = other RNA
tcaaatttgagtaatagat

SEQ ID NO: 4630 - RNA, 19 nt, synthetic construct
  source 1..19: mol_type = other RNA
caaatttgagtaatagatg

SEQ ID NO: 4631 - RNA, 19 nt, synthetic construct
  source 1..19: mol_type = other RNA
aaatttgagtaatagatgc

SEQ ID NO: 4632 - RNA, 19 nt, synthetic construct
  source 1..19: mol_type = other RNA
aatttgagtaatagatgcc

SEQ ID NO: 4633 - RNA, 19 nt, synthetic construct
  source 1..19: mol_type = other RNA
atttgagtaatagatgcct

SEQ ID NO: 4634 - RNA, 19 nt, synthetic construct
  source 1..19: mol_type = other RNA
tttgagtaatagatgcctt

SEQ ID NO: 4635 - RNA, 19 nt, synthetic construct
  source 1..19: mol_type = other RNA
ttgagtaatagatgccttt

SEQ ID NO: 4636 - RNA, 19 nt, synthetic construct
  source 1..19: mol_type = other RNA
tgagtaatagatgcctttt

SEQ ID NO: 4637 - RNA, 19 nt, synthetic construct
  source 1..19: mol_type = other RNA
gagtaatagatgccttttt

SEQ ID NO: 4638 - RNA, 19 nt, synthetic construct
  source 1..19: mol_type = other RNA
agtaatagatgccttttta

SEQ ID NO: 4639 - RNA, 19 nt, synthetic construct
  source 1..19: mol_type = other RNA
gtaatagatgcctttttaa

SEQ ID NO: 4640 - RNA, 19 nt, synthetic construct
  source 1..19: mol_type = other RNA
taatagatgcctttttaag

SEQ ID NO: 4641 - RNA, 19 nt, synthetic construct
  source 1..19: mol_type = other RNA
aatagatgcctttttaagg

SEQ ID NO: 4642 - RNA, 19 nt, synthetic construct
  source 1..19: mol_type = other RNA
atagatgcctttttaaggc

SEQ ID NO: 4643 - RNA, 19 nt, synthetic construct
  source 1..19: mol_type = other RNA
tagatgcctttttaaggca

SEQ ID NO: 4644 - RNA, 19 nt, synthetic construct
  source 1..19: mol_type = other RNA
agatgcctttttaaggcag

SEQ ID NO: 4645 - RNA, 19 nt, synthetic construct
  source 1..19: mol_type = other RNA
gatgcctttttaaggcagt

SEQ ID NO: 4646 - RNA, 19 nt, synthetic construct
  source 1..19: mol_type = other RNA
atgcctttttaaggcagtg

SEQ ID NO: 4647 - RNA, 19 nt, synthetic construct
  source 1..19: mol_type = other RNA
tgcctttttaaggcagtga

SEQ ID NO: 4648 - RNA, 19 nt, synthetic construct
  source 1..19: mol_type = other RNA
gcctttttaaggcagtgaa

SEQ ID NO: 4649 - RNA, 19 nt, synthetic construct
  source 1..19: mol_type = other RNA
cctttttaaggcagtgaat

SEQ ID NO: 4650 - RNA, 19 nt, synthetic construct
  source 1..19: mol_type = other RNA
ctttttaaggcagtgaatt

SEQ ID NO: 4651 - RNA, 19 nt, synthetic construct
  source 1..19: mol_type = other RNA
tttttaaggcagtgaattt

SEQ ID NO: 4652 - RNA, 19 nt, synthetic construct
  source 1..19: mol_type = other RNA
ttttaaggcagtgaattta

SEQ ID NO: 4653 - RNA, 19 nt, synthetic construct
  source 1..19: mol_type = other RNA
tttaaggcagtgaatttac

SEQ ID NO: 4654 - RNA, 19 nt, synthetic construct
  source 1..19: mol_type = other RNA
ttaaggcagtgaatttaca

SEQ ID NO: 4655 - RNA, 19 nt, synthetic construct
  source 1..19: mol_type = other RNA
taaggcagtgaatttacac

SEQ ID NO: 4656 - RNA, 19 nt, synthetic construct
  source 1..19: mol_type = other RNA
aaggcagtgaatttacaca

SEQ ID NO: 4657 - RNA, 19 nt, synthetic construct
  source 1..19: mol_type = other RNA
aggcagtgaatttacacaa

SEQ ID NO: 4658 - RNA, 19 nt, synthetic construct
  source 1..19: mol_type = other RNA
ggcagtgaatttacacaaa

SEQ ID NO: 4659 - RNA, 19 nt, synthetic construct
  source 1..19: mol_type = other RNA
gcagtgaatttacacaaat

SEQ ID NO: 4660 - RNA, 19 nt, synthetic construct
  source 1..19: mol_type = other RNA
cagtgaatttacacaaata

SEQ ID NO: 4661 - RNA, 19 nt, synthetic construct
  source 1..19: mol_type = other RNA
agtgaatttacacaaatat

SEQ ID NO: 4662 - RNA, 19 nt, synthetic construct
  source 1..19: mol_type = other RNA
gtgaatttacacaaatatg

SEQ ID NO: 4663 - RNA, 19 nt, synthetic construct
  source 1..19: mol_type = other RNA
tgaatttacacaaatatgg

SEQ ID NO: 4664 - RNA, 19 nt, synthetic construct
  source 1..19: mol_type = other RNA
gaatttacacaaatatggg

SEQ ID NO: 4665 - RNA, 19 nt, synthetic construct
  source 1..19: mol_type = other RNA
aatttacacaaatatggga

SEQ ID NO: 4666 - RNA, 19 nt, synthetic construct
  source 1..19: mol_type = other RNA
atttacacaaatatgggag

SEQ ID NO: 4667 - RNA, 19 nt, synthetic construct
  source 1..19: mol_type = other RNA
tttacacaaatatgggagg

SEQ ID NO: 4668 - RNA, 19 nt, synthetic construct
  source 1..19: mol_type = other RNA
ttacacaaatatgggaggg

SEQ ID NO: 4669 - RNA, 19 nt, synthetic construct
  source 1..19: mol_type = other RNA
tacacaaatatgggagggg

SEQ ID NO: 4670 - RNA, 19 nt, synthetic construct
  source 1..19: mol_type = other RNA
acacaaatatgggaggggt

SEQ ID NO: 4671 - RNA, 19 nt, synthetic construct
  source 1..19: mol_type = other RNA
cacaaatatgggaggggta

SEQ ID NO: 4672 - RNA, 19 nt, synthetic construct
  source 1..19: mol_type = other RNA
acaaatatgggaggggtat

SEQ ID NO: 4673 - RNA, 19 nt, synthetic construct
  source 1..19: mol_type = other RNA
caaatatgggaggggtata

SEQ ID NO: 4674 - RNA, 19 nt, synthetic construct
  source 1..19: mol_type = other RNA
aaatatgggaggggtatat

SEQ ID NO: 4675 - RNA, 19 nt, synthetic construct
  source 1..19: mol_type = other RNA
aatatgggaggggtatatg

SEQ ID NO: 4676 - RNA, 19 nt, synthetic construct
  source 1..19: mol_type = other RNA
atatgggaggggtatatgg

SEQ ID NO: 4677 - RNA, 19 nt, synthetic construct
  source 1..19: mol_type = other RNA
tatgggaggggtatatggt

SEQ ID NO: 4678 - RNA, 19 nt, synthetic construct
  source 1..19: mol_type = other RNA
atgggaggggtatatggtg

SEQ ID NO: 4679 - RNA, 19 nt, synthetic construct
  source 1..19: mol_type = other RNA
tgggaggggtatatggtgt

SEQ ID NO: 4680 - RNA, 19 nt, synthetic construct
  source 1..19: mol_type = other RNA
gggaggggtatatggtgtt

SEQ ID NO: 4681 - RNA, 19 nt, synthetic construct
  source 1..19: mol_type = other RNA
ggaggggtatatggtgtta

SEQ ID NO: 4682 - RNA, 19 nt, synthetic construct
  source 1..19: mol_type = other RNA
gaggggtatatggtgttac

SEQ ID NO: 4683 - RNA, 19 nt, synthetic construct
  source 1..19: mol_type = other RNA
aggggtatatggtgttact

SEQ ID NO: 4684 - RNA, 19 nt, synthetic construct
  source 1..19: mol_type = other RNA
ggggtatatggtgttactg

SEQ ID NO: 4685 - RNA, 19 nt, synthetic construct
  source 1..19: mol_type = other RNA
gggtatatggtgttactga

SEQ ID NO: 4686 - RNA, 19 nt, synthetic construct
  source 1..19: mol_type = other RNA
ggtatatggtgttactgat

SEQ ID NO: 4687 - RNA, 19 nt, synthetic construct
  source 1..19: mol_type = other RNA
gtatatggtgttactgatt

SEQ ID NO: 4688 - RNA, 19 nt, synthetic construct
  source 1..19: mol_type = other RNA
tatatggtgttactgattt

SEQ ID NO: 4689 - RNA, 19 nt, synthetic construct
  source 1..19: mol_type = other RNA
atatggtgttactgatttt

SEQ ID NO: 4690 - RNA, 19 nt, synthetic construct
  source 1..19: mol_type = other RNA
tatggtgttactgattttt

SEQ ID NO: 4691 - RNA, 19 nt, synthetic construct
  source 1..19: mol_type = other RNA
atggtgttactgattttta

SEQ ID NO: 4692 - RNA, 19 nt, synthetic construct
  source 1..19: mol_type = other RNA
tggtgttactgatttttaa

SEQ ID NO: 4693 - RNA, 19 nt, synthetic construct
  source 1..19: mol_type = other RNA
ggtgttactgatttttaaa

SEQ ID NO: 4694 - RNA, 19 nt, synthetic construct
  source 1..19: mol_type = other RNA
gtgttactgatttttaaac

SEQ ID NO: 4695 - RNA, 19 nt, synthetic construct
  source 1..19: mol_type = other RNA
tgttactgatttttaaacc

SEQ ID NO: 4696 - RNA, 19 nt, synthetic construct
  source 1..19: mol_type = other RNA
gttactgatttttaaacct

SEQ ID NO: 4697 - RNA, 19 nt, synthetic construct
  source 1..19: mol_type = other RNA
ttactgatttttaaacctc

SEQ ID NO: 4698 - RNA, 19 nt, synthetic construct
  source 1..19: mol_type = other RNA
tactgatttttaaacctct

SEQ ID NO: 4699 - RNA, 19 nt, synthetic construct
  source 1..19: mol_type = other RNA
actgatttttaaacctctt

SEQ ID NO: 4700 - RNA, 19 nt, synthetic construct
  source 1..19: mol_type = other RNA
ctgatttttaaacctcttt

SEQ ID NO: 4701 - RNA, 19 nt, synthetic construct
  source 1..19: mol_type = other RNA
tgatttttaaacctctttg

SEQ ID NO: 4702 - RNA, 19 nt, synthetic construct
  source 1..19: mol_type = other RNA
gatttttaaacctctttga

SEQ ID NO: 4703 - RNA, 19 nt, synthetic construct
  source 1..19: mol_type = other RNA
atttttaaacctctttgac

SEQ ID NO: 4704 - RNA, 19 nt, synthetic construct
  source 1..19: mol_type = other RNA
tttttaaacctctttgacc

SEQ ID NO: 4705 - RNA, 19 nt, synthetic construct
  source 1..19: mol_type = other RNA
ttttaaacctctttgacca

SEQ ID NO: 4706 - RNA, 19 nt, synthetic construct
  source 1..19: mol_type = other RNA
tttaaacctctttgaccat

SEQ ID NO: 4707 - RNA, 19 nt, synthetic construct
  source 1..19: mol_type = other RNA
ttaaacctctttgaccatc

SEQ ID NO: 4708 - RNA, 19 nt, synthetic construct
  source 1..19: mol_type = other RNA
taaacctctttgaccatct

SEQ ID NO: 4709 - RNA, 19 nt, synthetic construct
  source 1..19: mol_type = other RNA
aaacctctttgaccatctt

SEQ ID NO: 4710 - RNA, 19 nt, synthetic construct
  source 1..19: mol_type = other RNA
aacctctttgaccatcttc

SEQ ID NO: 4711 - RNA, 19 nt, synthetic construct
  source 1..19: mol_type = other RNA
acctctttgaccatcttct

SEQ ID NO: 4712 - RNA, 19 nt, synthetic construct
  source 1..19: mol_type = other RNA
cctctttgaccatcttcta

SEQ ID NO: 4713 - RNA, 19 nt, synthetic construct
  source 1..19: mol_type = other RNA
ctctttgaccatcttctag

SEQ ID NO: 4714 - RNA, 19 nt, synthetic construct
  source 1..19: mol_type = other RNA
tctttgaccatcttctagt

SEQ ID NO: 4715 - RNA, 19 nt, synthetic construct
  source 1..19: mol_type = other RNA
ctttgaccatcttctagtt

SEQ ID NO: 4716 - RNA, 19 nt, synthetic construct
  source 1..19: mol_type = other RNA
tttgaccatcttctagttt

SEQ ID NO: 4717 - RNA, 19 nt, synthetic construct
  source 1..19: mol_type = other RNA
ttgaccatcttctagtttt

SEQ ID NO: 4718 - RNA, 19 nt, synthetic construct
  source 1..19: mol_type = other RNA
tgaccatcttctagttttt

SEQ ID NO: 4719 - RNA, 19 nt, synthetic construct
  source 1..19: mol_type = other RNA
gaccatcttctagttttta

SEQ ID NO: 4720 - RNA, 19 nt, synthetic construct
  source 1..19: mol_type = other RNA
accatcttctagtttttac

SEQ ID NO: 4721 - RNA, 19 nt, synthetic construct
  source 1..19: mol_type = other RNA
ccatcttctagtttttact

SEQ ID NO: 4722 - RNA, 19 nt, synthetic construct
  source 1..19: mol_type = other RNA
catcttctagtttttactt

SEQ ID NO: 4723 - RNA, 19 nt, synthetic construct
  source 1..19: mol_type = other RNA
atcttctagtttttacttc

SEQ ID NO: 4724 - RNA, 19 nt, synthetic construct
  source 1..19: mol_type = other RNA
tcttctagtttttacttct

SEQ ID NO: 4725 - RNA, 19 nt, synthetic construct
  source 1..19: mol_type = other RNA
cttctagtttttacttcta

SEQ ID NO: 4726 - RNA, 19 nt, synthetic construct
  source 1..19: mol_type = other RNA
ttctagtttttacttctag

SEQ ID NO: 4727 - RNA, 19 nt, synthetic construct
  source 1..19: mol_type = other RNA
tctagtttttacttctagt

SEQ ID NO: 4728 - RNA, 19 nt, synthetic construct
  source 1..19: mol_type = other RNA
ctagtttttacttctagtt

SEQ ID NO: 4729 - RNA, 19 nt, synthetic construct
  source 1..19: mol_type = other RNA
tagtttttacttctagttt

SEQ ID NO: 4730 - RNA, 19 nt, synthetic construct
  source 1..19: mol_type = other RNA
agtttttacttctagtttt

SEQ ID NO: 4731 - RNA, 19 nt, synthetic construct
  source 1..19: mol_type = other RNA
gtttttacttctagttttt

SEQ ID NO: 4732 - RNA, 19 nt, synthetic construct
  source 1..19: mol_type = other RNA
tttttacttctagttttta

SEQ ID NO: 4733 - RNA, 19 nt, synthetic construct
  source 1..19: mol_type = other RNA
ttttacttctagtttttac

SEQ ID NO: 4734 - RNA, 19 nt, synthetic construct
  source 1..19: mol_type = other RNA
tttacttctagtttttaca

SEQ ID NO: 4735 - RNA, 19 nt, synthetic construct
  source 1..19: mol_type = other RNA
ttacttctagtttttacat

SEQ ID NO: 4736 - RNA, 19 nt, synthetic construct
  source 1..19: mol_type = other RNA
tacttctagtttttacatc

SEQ ID NO: 4737 - RNA, 19 nt, synthetic construct
  source 1..19: mol_type = other RNA
acttctagtttttacatct

SEQ ID NO: 4738 - RNA, 19 nt, synthetic construct
  source 1..19: mol_type = other RNA
cttctagtttttacatcta

SEQ ID NO: 4739 - RNA, 19 nt, synthetic construct
  source 1..19: mol_type = other RNA
ttctagtttttacatctag

SEQ ID NO: 4740 - RNA, 19 nt, synthetic construct
  source 1..19: mol_type = other RNA
tctagtttttacatctagg

SEQ ID NO: 4741 - RNA, 19 nt, synthetic construct
  source 1..19: mol_type = other RNA
ctagtttttacatctagga

SEQ ID NO: 4742 - RNA, 19 nt, synthetic construct
  source 1..19: mol_type = other RNA
tagtttttacatctaggag

SEQ ID NO: 4743 - RNA, 19 nt, synthetic construct
  source 1..19: mol_type = other RNA
agtttttacatctaggaga

SEQ ID NO: 4744 - RNA, 19 nt, synthetic construct
  source 1..19: mol_type = other RNA
gtttttacatctaggagaa

SEQ ID NO: 4745 - RNA, 19 nt, synthetic construct
  source 1..19: mol_type = other RNA
tttttacatctaggagaat

SEQ ID NO: 4746 - RNA, 19 nt, synthetic construct
  source 1..19: mol_type = other RNA
ttttacatctaggagaatt

SEQ ID NO: 4747 - RNA, 19 nt, synthetic construct
  source 1..19: mol_type = other RNA
tttacatctaggagaattg

SEQ ID NO: 4748 - RNA, 19 nt, synthetic construct
  source 1..19: mol_type = other RNA
ttacatctaggagaattgt

SEQ ID NO: 4749 - RNA, 19 nt, synthetic construct
  source 1..19: mol_type = other RNA
tacatctaggagaattgtg

SEQ ID NO: 4750 - RNA, 19 nt, synthetic construct
  source 1..19: mol_type = other RNA
acatctaggagaattgtga

SEQ ID NO: 4751 - RNA, 19 nt, synthetic construct
  source 1..19: mol_type = other RNA
catctaggagaattgtgaa

SEQ ID NO: 4752 - RNA, 19 nt, synthetic construct
  source 1..19: mol_type = other RNA
atctaggagaattgtgaat

SEQ ID NO: 4753 - RNA, 19 nt, synthetic construct
  source 1..19: mol_type = other RNA
tctaggagaattgtgaata

SEQ ID NO: 4754 - RNA, 19 nt, synthetic construct
  source 1..19: mol_type = other RNA
ctaggagaattgtgaataa

SEQ ID NO: 4755 - RNA, 19 nt, synthetic construct
  source 1..19: mol_type = other RNA
taggagaattgtgaataac

SEQ ID NO: 4756 - RNA, 19 nt, synthetic construct
  source 1..19: mol_type = other RNA
aggagaattgtgaataaca

SEQ ID NO: 4757 - RNA, 19 nt, synthetic construct
  source 1..19: mol_type = other RNA
ggagaattgtgaataacac

SEQ ID NO: 4758 - RNA, 19 nt, synthetic construct
  source 1..19: mol_type = other RNA
gagaattgtgaataacacc

SEQ ID NO: 4759 - RNA, 19 nt, synthetic construct
  source 1..19: mol_type = other RNA
agaattgtgaataacacca

SEQ ID NO: 4760 - RNA, 19 nt, synthetic construct
  source 1..19: mol_type = other RNA
gaattgtgaataacaccaa

SEQ ID NO: 4761 - RNA, 19 nt, synthetic construct
  source 1..19: mol_type = other RNA
aattgtgaataacaccaac

SEQ ID NO: 4762 - RNA, 19 nt, synthetic construct
  source 1..19: mol_type = other RNA
attgtgaataacaccaact

SEQ ID NO: 4763 - RNA, 19 nt, synthetic construct
  source 1..19: mol_type = other RNA
ttgtgaataacaccaactg

SEQ ID NO: 4764 - RNA, 19 nt, synthetic construct
  source 1..19: mol_type = other RNA
tgtgaataacaccaactgt

SEQ ID NO: 4765 - RNA, 19 nt, synthetic construct
  source 1..19: mol_type = other RNA
gtgaataacaccaactgtt

SEQ ID NO: 4766 - RNA, 19 nt, synthetic construct
  source 1..19: mol_type = other RNA
tgaataacaccaactgttc

SEQ ID NO: 4767 - RNA, 19 nt, synthetic construct
  source 1..19: mol_type = other RNA
gaataacaccaactgttct

SEQ ID NO: 4768 - RNA, 19 nt, synthetic construct
  source 1..19: mol_type = other RNA
aataacaccaactgttctt

SEQ ID NO: 4769 - RNA, 19 nt, synthetic construct
  source 1..19: mol_type = other RNA
ataacaccaactgttctta

SEQ ID NO: 4770 - RNA, 19 nt, synthetic construct
  source 1..19: mol_type = other RNA
taacaccaactgttcttaa

SEQ ID NO: 4771 - RNA, 19 nt, synthetic construct
  source 1..19: mol_type = other RNA
aacaccaactgttcttaaa

SEQ ID NO: 4772 - RNA, 19 nt, synthetic construct
  source 1..19: mol_type = other RNA
acaccaactgttcttaaac

SEQ ID NO: 4773 - RNA, 19 nt, synthetic construct
  source 1..19: mol_type = other RNA
caccaactgttcttaaact

SEQ ID NO: 4774 - RNA, 19 nt, synthetic construct
  source 1..19: mol_type = other RNA
accaactgttcttaaactc

SEQ ID NO: 4775 - RNA, 19 nt, synthetic construct
  source 1..19: mol_type = other RNA
ccaactgttcttaaactct

SEQ ID NO: 4776 - RNA, 19 nt, synthetic construct
  source 1..19: mol_type = other RNA
caactgttcttaaactctt

SEQ ID NO: 4777 - RNA, 19 nt, synthetic construct
  source 1..19: mol_type = other RNA
aactgttcttaaactcttt

SEQ ID NO: 4778 - RNA, 19 nt, synthetic construct
  source 1..19: mol_type = other RNA
actgttcttaaactcttta

SEQ ID NO: 4779 - RNA, 19 nt, synthetic construct
  source 1..19: mol_type = other RNA
ctgttcttaaactctttaa

SEQ ID NO: 4780 - RNA, 19 nt, synthetic construct
  source 1..19: mol_type = other RNA
tgttcttaaactctttaat

SEQ ID NO: 4781 - RNA, 19 nt, synthetic construct
  source 1..19: mol_type = other RNA
gttcttaaactctttaatg

SEQ ID NO: 4782 - RNA, 19 nt, synthetic construct
  source 1..19: mol_type = other RNA
ttcttaaactctttaatgc

SEQ ID NO: 4783 - RNA, 19 nt, synthetic construct
  source 1..19: mol_type = other RNA
tcttaaactctttaatgcc

SEQ ID NO: 4784 - RNA, 19 nt, synthetic construct
  source 1..19: mol_type = other RNA
cttaaactctttaatgcca

SEQ ID NO: 4785 - RNA, 19 nt, synthetic construct
  source 1..19: mol_type = other RNA
ttaaactctttaatgccat

SEQ ID NO: 4786 - RNA, 19 nt, synthetic construct
  source 1..19: mol_type = other RNA
taaactctttaatgccatg

SEQ ID NO: 4787 - RNA, 19 nt, synthetic construct
  source 1..19: mol_type = other RNA
aaactctttaatgccatgt

SEQ ID NO: 4788 - RNA, 19 nt, synthetic construct
  source 1..19: mol_type = other RNA
aactctttaatgccatgtc

SEQ ID NO: 4789 - RNA, 19 nt, synthetic construct
  source 1..19: mol_type = other RNA
actctttaatgccatgtct

SEQ ID NO: 4790 - RNA, 19 nt, synthetic construct
  source 1..19: mol_type = other RNA
ctctttaatgccatgtctt

SEQ ID NO: 4791 - RNA, 19 nt, synthetic construct
  source 1..19: mol_type = other RNA
tctttaatgccatgtctta

SEQ ID NO: 4792 - RNA, 19 nt, synthetic construct
  source 1..19: mol_type = other RNA
ctttaatgccatgtcttaa

SEQ ID NO: 4793 - RNA, 19 nt, synthetic construct
  source 1..19: mol_type = other RNA
tttaatgccatgtcttaaa

SEQ ID NO: 4794 - RNA, 19 nt, synthetic construct
  source 1..19: mol_type = other RNA
ttaatgccatgtcttaaat

SEQ ID NO: 4795 - RNA, 19 nt, synthetic construct
  source 1..19: mol_type = other RNA
taatgccatgtcttaaatg

SEQ ID NO: 4796 - RNA, 19 nt, synthetic construct
  source 1..19: mol_type = other RNA
aatgccatgtcttaaatgc

SEQ ID NO: 4797 - RNA, 19 nt, synthetic construct
  source 1..19: mol_type = other RNA
atgccatgtcttaaatgcc

SEQ ID NO: 4798 - RNA, 19 nt, synthetic construct
  source 1..19: mol_type = other RNA
tgccatgtcttaaatgccg

SEQ ID NO: 4799 - RNA, 19 nt, synthetic construct
  source 1..19: mol_type = other RNA
gccatgtcttaaatgccgg

SEQ ID NO: 4800 - RNA, 19 nt, synthetic construct
  source 1..19: mol_type = other RNA
ccatgtcttaaatgccggt

SEQ ID NO: 4801 - RNA, 19 nt, synthetic construct
  source 1..19: mol_type = other RNA
catgtcttaaatgccggta

SEQ ID NO: 4802 - RNA, 19 nt, synthetic construct
  source 1..19: mol_type = other RNA
atgtcttaaatgccggtat

SEQ ID NO: 4803 - RNA, 19 nt, synthetic construct
  source 1..19: mol_type = other RNA
tgtcttaaatgccggtatt

SEQ ID NO: 4804 - RNA, 19 nt, synthetic construct
  source 1..19: mol_type = other RNA
gtcttaaatgccggtattt

SEQ ID NO: 4805 - RNA, 19 nt, synthetic construct
  source 1..19: mol_type = other RNA
tcttaaatgccggtatttg

SEQ ID NO: 4806 - RNA, 19 nt, synthetic construct
  source 1..19: mol_type = other RNA
cttaaatgccggtatttgc

SEQ ID NO: 4807 - RNA, 19 nt, synthetic construct
  source 1..19: mol_type = other RNA
ttaaatgccggtatttgct

SEQ ID NO: 4808 - RNA, 19 nt, synthetic construct
  source 1..19: mol_type = other RNA
taaatgccggtatttgctg

SEQ ID NO: 4809 - RNA, 19 nt, synthetic construct
  source 1..19: mol_type = other RNA
aaatgccggtatttgctgc

SEQ ID NO: 4810 - RNA, 19 nt, synthetic construct
  source 1..19: mol_type = other RNA
aatgccggtatttgctgct

SEQ ID NO: 4811 - RNA, 19 nt, synthetic construct
  source 1..19: mol_type = other RNA
atgccggtatttgctgctg

SEQ ID NO: 4812 - RNA, 19 nt, synthetic construct
  source 1..19: mol_type = other RNA
tgccggtatttgctgctga

SEQ ID NO: 4813 - RNA, 19 nt, synthetic construct
  source 1..19: mol_type = other RNA
gccggtatttgctgctgaa

SEQ ID NO: 4814 - RNA, 19 nt, synthetic construct
  source 1..19: mol_type = other RNA
ccggtatttgctgctgaag

SEQ ID NO: 4815 - RNA, 19 nt, synthetic construct
  source 1..19: mol_type = other RNA
cggtatttgctgctgaaga

SEQ ID NO: 4816 - RNA, 19 nt, synthetic construct
  source 1..19: mol_type = other RNA
ggtatttgctgctgaagac

SEQ ID NO: 4817 - RNA, 19 nt, synthetic construct
  source 1..19: mol_type = other RNA
gtatttgctgctgaagaca

SEQ ID NO: 4818 - RNA, 19 nt, synthetic construct
  source 1..19: mol_type = other RNA
tatttgctgctgaagacaa

SEQ ID NO: 4819 - RNA, 19 nt, synthetic construct
  source 1..19: mol_type = other RNA
atttgctgctgaagacaaa

SEQ ID NO: 4820 - RNA, 19 nt, synthetic construct
  source 1..19: mol_type = other RNA
tttgctgctgaagacaaaa

SEQ ID NO: 4821 - RNA, 19 nt, synthetic construct
  source 1..19: mol_type = other RNA
ttgctgctgaagacaaaaa

SEQ ID NO: 4822 - RNA, 19 nt, synthetic construct
  source 1..19: mol_type = other RNA
tgctgctgaagacaaaaat

SEQ ID NO: 4823 - RNA, 19 nt, synthetic construct
  source 1..19: mol_type = other RNA
gctgctgaagacaaaaatg

SEQ ID NO: 4824 - RNA, 19 nt, synthetic construct
  source 1..19: mol_type = other RNA
ctgctgaagacaaaaatga

SEQ ID NO: 4825 - RNA, 19 nt, synthetic construct
  source 1..19: mol_type = other RNA
tgctgaagacaaaaatgaa

SEQ ID NO: 4826 - RNA, 19 nt, synthetic construct
  source 1..19: mol_type = other RNA
gctgaagacaaaaatgaaa

SEQ ID NO: 4827 - RNA, 19 nt, synthetic construct
  source 1..19: mol_type = other RNA
ctgaagacaaaaatgaaaa

SEQ ID NO: 4828 - RNA, 19 nt, synthetic construct
  source 1..19: mol_type = other RNA
tgaagacaaaaatgaaaag

SEQ ID NO: 4829 - RNA, 19 nt, synthetic construct
  source 1..19: mol_type = other RNA
gaagacaaaaatgaaaagt

SEQ ID NO: 4830 - RNA, 19 nt, synthetic construct
  source 1..19: mol_type = other RNA
aagacaaaaatgaaaagta

SEQ ID NO: 4831 - RNA, 19 nt, synthetic construct
  source 1..19: mol_type = other RNA
agacaaaaatgaaaagtag

SEQ ID NO: 4832 - RNA, 19 nt, synthetic construct
  source 1..19: mol_type = other RNA
gacaaaaatgaaaagtagg

SEQ ID NO: 4833 - RNA, 19 nt, synthetic construct
  source 1..19: mol_type = other RNA
acaaaaatgaaaagtagga

SEQ ID NO: 4834 - RNA, 19 nt, synthetic construct
  source 1..19: mol_type = other RNA
caaaaatgaaaagtaggat

SEQ ID NO: 4835 - RNA, 19 nt, synthetic construct
  source 1..19: mol_type = other RNA
aaaaatgaaaagtaggatg

SEQ ID NO: 4836 - RNA, 19 nt, synthetic construct
  source 1..19: mol_type = other RNA
aaaatgaaaagtaggatga

SEQ ID NO: 4837 - RNA, 19 nt, synthetic construct
  source 1..19: mol_type = other RNA
aaatgaaaagtaggatgaa

SEQ ID NO: 4838 - RNA, 19 nt, synthetic construct
  source 1..19: mol_type = other RNA
aatgaaaagtaggatgaaa

SEQ ID NO: 4839 - RNA, 19 nt, synthetic construct
  source 1..19: mol_type = other RNA
atgaaaagtaggatgaaaa

SEQ ID NO: 4840 - RNA, 19 nt, synthetic construct
  source 1..19: mol_type = other RNA
tgaaaagtaggatgaaaat

SEQ ID NO: 4841 - RNA, 19 nt, synthetic construct
  source 1..19: mol_type = other RNA
gaaaagtaggatgaaaata

SEQ ID NO: 4842 - RNA, 19 nt, synthetic construct
  source 1..19: mol_type = other RNA
aaaagtaggatgaaaataa

SEQ ID NO: 4843 - RNA, 19 nt, synthetic construct
  source 1..19: mol_type = other RNA
aaagtaggatgaaaataat

SEQ ID NO: 4844 - RNA, 19 nt, synthetic construct
  source 1..19: mol_type = other RNA
aagtaggatgaaaataata

SEQ ID NO: 4845 - RNA, 19 nt, synthetic construct
  source 1..19: mol_type = other RNA
agtaggatgaaaataatag

SEQ ID NO: 4846 - RNA, 19 nt, synthetic construct
  source 1..19: mol_type = other RNA
gtaggatgaaaataataga

SEQ ID NO: 4847 - RNA, 19 nt, synthetic construct
  source 1..19: mol_type = other RNA
taggatgaaaataatagaa

SEQ ID NO: 4848 - RNA, 19 nt, synthetic construct
  source 1..19: mol_type = other RNA
aggatgaaaataatagaat

SEQ ID NO: 4849 - RNA, 19 nt, synthetic construct
  source 1..19: mol_type = other RNA
ggatgaaaataatagaatg

SEQ ID NO: 4850 - RNA, 19 nt, synthetic construct
  source 1..19: mol_type = other RNA
gatgaaaataatagaatgg

SEQ ID NO: 4851 - RNA, 19 nt, synthetic construct
  source 1..19: mol_type = other RNA
atgaaaataatagaatggc

SEQ ID NO: 4852 - RNA, 19 nt, synthetic construct
  source 1..19: mol_type = other RNA
tgaaaataatagaatggca

SEQ ID NO: 4853 - RNA, 19 nt, synthetic construct
  source 1..19: mol_type = other RNA
gaaaataatagaatggcac

SEQ ID NO: 4854 - RNA, 19 nt, synthetic construct
  source 1..19: mol_type = other RNA
aaaataatagaatggcact

SEQ ID NO: 4855 - RNA, 19 nt, synthetic construct
  source 1..19: mol_type = other RNA
aaataatagaatggcactg

SEQ ID NO: 4856 - RNA, 19 nt, synthetic construct
  source 1..19: mol_type = other RNA
aataatagaatggcactgt

SEQ ID NO: 4857 - RNA, 19 nt, synthetic construct
  source 1..19: mol_type = other RNA
ataatagaatggcactgta

SEQ ID NO: 4858 - RNA, 19 nt, synthetic construct
  source 1..19: mol_type = other RNA
taatagaatggcactgtaa

SEQ ID NO: 4859 - RNA, 19 nt, synthetic construct
  source 1..19: mol_type = other RNA
aatagaatggcactgtaag

SEQ ID NO: 4860 - RNA, 19 nt, synthetic construct
  source 1..19: mol_type = other RNA
atagaatggcactgtaagt

SEQ ID NO: 4861 - RNA, 19 nt, synthetic construct
  source 1..19: mol_type = other RNA
tagaatggcactgtaagtg

SEQ ID NO: 4862 - RNA, 19 nt, synthetic construct
  source 1..19: mol_type = other RNA
agaatggcactgtaagtgt

SEQ ID NO: 4863 - RNA, 19 nt, synthetic construct
  source 1..19: mol_type = other RNA
gaatggcactgtaagtgtt

SEQ ID NO: 4864 - RNA, 19 nt, synthetic construct
  source 1..19: mol_type = other RNA
aatggcactgtaagtgttt

SEQ ID NO: 4865 - RNA, 19 nt, synthetic construct
  source 1..19: mol_type = other RNA
atggcactgtaagtgttta

SEQ ID NO: 4866 - RNA, 19 nt, synthetic construct
  source 1..19: mol_type = other RNA
tggcactgtaagtgtttat

SEQ ID NO: 4867 - RNA, 19 nt, synthetic construct
  source 1..19: mol_type = other RNA
ggcactgtaagtgtttatt

SEQ ID NO: 4868 - RNA, 19 nt, synthetic construct
  source 1..19: mol_type = other RNA
gcactgtaagtgtttatta

SEQ ID NO: 4869 - RNA, 19 nt, synthetic construct
  source 1..19: mol_type = other RNA
cactgtaagtgtttattat

SEQ ID NO: 4870 - RNA, 19 nt, synthetic construct
  source 1..19: mol_type = other RNA
actgtaagtgtttattatt

SEQ ID NO: 4871 - RNA, 19 nt, synthetic construct
  source 1..19: mol_type = other RNA
ctgtaagtgtttattattt

SEQ ID NO: 4872 - RNA, 19 nt, synthetic construct
  source 1..19: mol_type = other RNA
tgtaagtgtttattatttt

SEQ ID NO: 4873 - RNA, 19 nt, synthetic construct
  source 1..19: mol_type = other RNA
gtaagtgtttattattttg

SEQ ID NO: 4874 - RNA, 19 nt, synthetic construct
  source 1..19: mol_type = other RNA
taagtgtttattattttgt

SEQ ID NO: 4875 - RNA, 19 nt, synthetic construct
  source 1..19: mol_type = other RNA
aagtgtttattattttgtc

SEQ ID NO: 4876 - RNA, 19 nt, synthetic construct
  source 1..19: mol_type = other RNA
agtgtttattattttgtca

SEQ ID NO: 4877 - RNA, 19 nt, synthetic construct
  source 1..19: mol_type = other RNA
gtgtttattattttgtcaa

SEQ ID NO: 4878 - RNA, 19 nt, synthetic construct
  source 1..19: mol_type = other RNA
tgtttattattttgtcaaa

SEQ ID NO: 4879 - RNA, 19 nt, synthetic construct
  source 1..19: mol_type = other RNA
gtttattattttgtcaaaa

SEQ ID NO: 4880 - RNA, 19 nt, synthetic construct
  source 1..19: mol_type = other RNA
tttattattttgtcaaaat

SEQ ID NO: 4881 - RNA, 19 nt, synthetic construct
  source 1..19: mol_type = other RNA
ttattattttgtcaaaatg

SEQ ID NO: 4882 - RNA, 19 nt, synthetic construct
  source 1..19: mol_type = other RNA
tattattttgtcaaaatgt

SEQ ID NO: 4883 - RNA, 19 nt, synthetic construct
  source 1..19: mol_type = other RNA
attattttgtcaaaatgta

SEQ ID NO: 4884 - RNA, 19 nt, synthetic construct
  source 1..19: mol_type = other RNA
ttattttgtcaaaatgtaa

SEQ ID NO: 4885 - RNA, 19 nt, synthetic construct
  source 1..19: mol_type = other RNA
tattttgtcaaaatgtaaa

SEQ ID NO: 4886 - RNA, 19 nt, synthetic construct
  source 1..19: mol_type = other RNA
attttgtcaaaatgtaaac

SEQ ID NO: 4887 - RNA, 19 nt, synthetic construct
  source 1..19: mol_type = other RNA
ttttgtcaaaatgtaaaca

SEQ ID NO: 4888 - RNA, 19 nt, synthetic construct
  source 1..19: mol_type = other RNA
tttgtcaaaatgtaaacaa

SEQ ID NO: 4889 - RNA, 19 nt, synthetic construct
  source 1..19: mol_type = other RNA
ttgtcaaaatgtaaacaaa

SEQ ID NO: 4890 - RNA, 19 nt, synthetic construct
  source 1..19: mol_type = other RNA
tgtcaaaatgtaaacaaag

SEQ ID NO: 4891 - RNA, 19 nt, synthetic construct
  source 1..19: mol_type = other RNA
gtcaaaatgtaaacaaaga

SEQ ID NO: 4892 - RNA, 19 nt, synthetic construct
  source 1..19: mol_type = other RNA
tcaaaatgtaaacaaagac

SEQ ID NO: 4893 - RNA, 19 nt, synthetic construct
  source 1..19: mol_type = other RNA
caaaatgtaaacaaagact

SEQ ID NO: 4894 - RNA, 19 nt, synthetic construct
  source 1..19: mol_type = other RNA
aaaatgtaaacaaagacta

SEQ ID NO: 4895 - RNA, 19 nt, synthetic construct
  source 1..19: mol_type = other RNA
aaatgtaaacaaagactac

SEQ ID NO: 4896 - RNA, 19 nt, synthetic construct
  source 1..19: mol_type = other RNA
aatgtaaacaaagactaca

SEQ ID NO: 4897 - RNA, 19 nt, synthetic construct
  source 1..19: mol_type = other RNA
atgtaaacaaagactacat

SEQ ID NO: 4898 - RNA, 19 nt, synthetic construct
  source 1..19: mol_type = other RNA
tgtaaacaaagactacata

SEQ ID NO: 4899 - RNA, 19 nt, synthetic construct
  source 1..19: mol_type = other RNA
gtaaacaaagactacataa

SEQ ID NO: 4900 - RNA, 19 nt, synthetic construct
  source 1..19: mol_type = other RNA
taaacaaagactacataac

SEQ ID NO: 4901 - RNA, 19 nt, synthetic construct
  source 1..19: mol_type = other RNA
aaacaaagactacataacc

SEQ ID NO: 4902 - RNA, 19 nt, synthetic construct
  source 1..19: mol_type = other RNA
aacaaagactacataaccc

SEQ ID NO: 4903 - RNA, 19 nt, synthetic construct
  source 1..19: mol_type = other RNA
acaaagactacataaccca

SEQ ID NO: 4904 - RNA, 19 nt, synthetic construct
  source 1..19: mol_type = other RNA
caaagactacataacccaa

SEQ ID NO: 4905 - RNA, 19 nt, synthetic construct
  source 1..19: mol_type = other RNA
aaagactacataacccaat

SEQ ID NO: 4906 - RNA, 19 nt, synthetic construct
  source 1..19: mol_type = other RNA
aagactacataacccaatg

SEQ ID NO: 4907 - RNA, 19 nt, synthetic construct
  source 1..19: mol_type = other RNA
agactacataacccaatga

SEQ ID NO: 4908 - RNA, 19 nt, synthetic construct
  source 1..19: mol_type = other RNA
gactacataacccaatgat

SEQ ID NO: 4909 - RNA, 19 nt, synthetic construct
  source 1..19: mol_type = other RNA
actacataacccaatgatg

SEQ ID NO: 4910 - RNA, 19 nt, synthetic construct
  source 1..19: mol_type = other RNA
ctacataacccaatgatgg

SEQ ID NO: 4911 - RNA, 19 nt, synthetic construct
  source 1..19: mol_type = other RNA
tacataacccaatgatgga

SEQ ID NO: 4912 - RNA, 19 nt, synthetic construct
  source 1..19: mol_type = other RNA
acataacccaatgatggag

SEQ ID NO: 4913 - RNA, 19 nt, synthetic construct
  source 1..19: mol_type = other RNA
cataacccaatgatggagg

SEQ ID NO: 4914 - RNA, 19 nt, synthetic construct
  source 1..19: mol_type = other RNA
ataacccaatgatggaggg

SEQ ID NO: 4915 - RNA, 19 nt, synthetic construct
  source 1..19: mol_type = other RNA
taacccaatgatggaggga

SEQ ID NO: 4916 - RNA, 19 nt, synthetic construct
  source 1..19: mol_type = other RNA
aacccaatgatggagggaa

SEQ ID NO: 4917 - RNA, 19 nt, synthetic construct
  source 1..19: mol_type = other RNA
acccaatgatggagggaaa

SEQ ID NO: 4918 - RNA, 19 nt, synthetic construct
  source 1..19: mol_type = other RNA
cccaatgatggagggaaaa

SEQ ID NO: 4919 - RNA, 19 nt, synthetic construct
  source 1..19: mol_type = other RNA
ccaatgatggagggaaaaa

SEQ ID NO: 4920 - RNA, 19 nt, synthetic construct
  source 1..19: mol_type = other RNA
caatgatggagggaaaaag

SEQ ID NO: 4921 - RNA, 19 nt, synthetic construct
  source 1..19: mol_type = other RNA
aatgatggagggaaaaagg

SEQ ID NO: 4922 - RNA, 19 nt, synthetic construct
  source 1..19: mol_type = other RNA
atgatggagggaaaaaggg

SEQ ID NO: 4923 - RNA, 19 nt, synthetic construct
  source 1..19: mol_type = other RNA
tgatggagggaaaaagggc

SEQ ID NO: 4924 - RNA, 19 nt, synthetic construct
  source 1..19: mol_type = other RNA
gatggagggaaaaagggca

SEQ ID NO: 4925 - RNA, 19 nt, synthetic construct
  source 1..19: mol_type = other RNA
atggagggaaaaagggcat

SEQ ID NO: 4926 - RNA, 19 nt, synthetic construct
  source 1..19: mol_type = other RNA
tggagggaaaaagggcatg

SEQ ID NO: 4927 - RNA, 19 nt, synthetic construct
  source 1..19: mol_type = other RNA
ggagggaaaaagggcatgt

SEQ ID NO: 4928 - RNA, 19 nt, synthetic construct
  source 1..19: mol_type = other RNA
gagggaaaaagggcatgta

SEQ ID NO: 4929 - RNA, 19 nt, synthetic construct
  source 1..19: mol_type = other RNA
agggaaaaagggcatgtat

SEQ ID NO: 4930 - RNA, 19 nt, synthetic construct
  source 1..19: mol_type = other RNA
gggaaaaagggcatgtatc

SEQ ID NO: 4931 - RNA, 19 nt, synthetic construct
  source 1..19: mol_type = other RNA
ggaaaaagggcatgtatct

SEQ ID NO: 4932 - RNA, 19 nt, synthetic construct
  source 1..19: mol_type = other RNA
gaaaaagggcatgtatctc

SEQ ID NO: 4933 - RNA, 19 nt, synthetic construct
  source 1..19: mol_type = other RNA
aaaaagggcatgtatctca

SEQ ID NO: 4934 - RNA, 19 nt, synthetic construct
  source 1..19: mol_type = other RNA
aaaagggcatgtatctcat

SEQ ID NO: 4935 - RNA, 19 nt, synthetic construct
  source 1..19: mol_type = other RNA
aaagggcatgtatctcatt

SEQ ID NO: 4936 - RNA, 19 nt, synthetic construct
  source 1..19: mol_type = other RNA
aagggcatgtatctcattc

SEQ ID NO: 4937 - RNA, 19 nt, synthetic construct
  source 1..19: mol_type = other RNA
agggcatgtatctcattca

SEQ ID NO: 4938 - RNA, 19 nt, synthetic construct
  source 1..19: mol_type = other RNA
gggcatgtatctcattcag

SEQ ID NO: 4939 - RNA, 19 nt, synthetic construct
  source 1..19: mol_type = other RNA
ggcatgtatctcattcaga

SEQ ID NO: 4940 - RNA, 19 nt, synthetic construct
  source 1..19: mol_type = other RNA
gcatgtatctcattcagat

SEQ ID NO: 4941 - RNA, 19 nt, synthetic construct
  source 1..19: mol_type = other RNA
catgtatctcattcagatg

SEQ ID NO: 4942 - RNA, 19 nt, synthetic construct
  source 1..19: mol_type = other RNA
atgtatctcattcagatgt

SEQ ID NO: 4943 - RNA, 19 nt, synthetic construct
  source 1..19: mol_type = other RNA
tgtatctcattcagatgtg

SEQ ID NO: 4944 - RNA, 19 nt, synthetic construct
  source 1..19: mol_type = other RNA
gtatctcattcagatgtgc

SEQ ID NO: 4945 - RNA, 19 nt, synthetic construct
  source 1..19: mol_type = other RNA
tatctcattcagatgtgcc

SEQ ID NO: 4946 - RNA, 19 nt, synthetic construct
  source 1..19: mol_type = other RNA
atctcattcagatgtgcct

SEQ ID NO: 4947 - RNA, 19 nt, synthetic construct
  source 1..19: mol_type = other RNA
tctcattcagatgtgcctt

SEQ ID NO: 4948 - RNA, 19 nt, synthetic construct
  source 1..19: mol_type = other RNA
ctcattcagatgtgccttt

SEQ ID NO: 4949 - RNA, 19 nt, synthetic construct
  source 1..19: mol_type = other RNA
tcattcagatgtgcctttt

SEQ ID NO: 4950 - RNA, 19 nt, synthetic construct
  source 1..19: mol_type = other RNA
cattcagatgtgccttttg

SEQ ID NO: 4951 - RNA, 19 nt, synthetic construct
  source 1..19: mol_type = other RNA
attcagatgtgccttttgt

SEQ ID NO: 4952 - RNA, 19 nt, synthetic construct
  source 1..19: mol_type = other RNA
ttcagatgtgccttttgtt

SEQ ID NO: 4953 - RNA, 19 nt, synthetic construct
  source 1..19: mol_type = other RNA
tcagatgtgccttttgttt

SEQ ID NO: 4954 - RNA, 19 nt, synthetic construct
  source 1..19: mol_type = other RNA
cagatgtgccttttgtttt

SEQ ID NO: 4955 - RNA, 19 nt, synthetic construct
  source 1..19: mol_type = other RNA
agatgtgccttttgttttt

SEQ ID NO: 4956 - RNA, 19 nt, synthetic construct
  source 1..19: mol_type = other RNA
gatgtgccttttgtttttg

SEQ ID NO: 4957 - RNA, 19 nt, synthetic construct
  source 1..19: mol_type = other RNA
atgtgccttttgtttttgc

SEQ ID NO: 4958 - RNA, 19 nt, synthetic construct
  source 1..19: mol_type = other RNA
tgtgccttttgtttttgca

SEQ ID NO: 4959 - RNA, 19 nt, synthetic construct
  source 1..19: mol_type = other RNA
gtgccttttgtttttgcag

SEQ ID NO: 4960 - RNA, 19 nt, synthetic construct
  source 1..19: mol_type = other RNA
tgccttttgtttttgcaga

SEQ ID NO: 4961 - RNA, 19 nt, synthetic construct
  source 1..19: mol_type = other RNA
gccttttgtttttgcagac

SEQ ID NO: 4962 - RNA, 19 nt, synthetic construct
  source 1..19: mol_type = other RNA
ccttttgtttttgcagact

SEQ ID NO: 4963 - RNA, 19 nt, synthetic construct
  source 1..19: mol_type = other RNA
cttttgtttttgcagacta

SEQ ID NO: 4964 - RNA, 19 nt, synthetic construct
  source 1..19: mol_type = other RNA
ttttgtttttgcagactat

SEQ ID NO: 4965 - RNA, 19 nt, synthetic construct
  source 1..19: mol_type = other RNA
tttgtttttgcagactatg

SEQ ID NO: 4966 - RNA, 19 nt, synthetic construct
  source 1..19: mol_type = other RNA
ttgtttttgcagactatga

SEQ ID NO: 4967 - RNA, 19 nt, synthetic construct
  source 1..19: mol_type = other RNA
tgtttttgcagactatgac

SEQ ID NO: 4968 - RNA, 19 nt, synthetic construct
  source 1..19: mol_type = other RNA
gtttttgcagactatgacg

SEQ ID NO: 4969 - RNA, 19 nt, synthetic construct
  source 1..19: mol_type = other RNA
tttttgcagactatgacgt

SEQ ID NO: 4970 - RNA, 19 nt, synthetic construct
  source 1..19: mol_type = other RNA
ttttgcagactatgacgtc

SEQ ID NO: 4971 - RNA, 19 nt, synthetic construct
  source 1..19: mol_type = other RNA
tttgcagactatgacgtct

SEQ ID NO: 4972 - RNA, 19 nt, synthetic construct
  source 1..19: mol_type = other RNA
ttgcagactatgacgtctt

SEQ ID NO: 4973 - RNA, 19 nt, synthetic construct
  source 1..19: mol_type = other RNA
tgcagactatgacgtcttt

SEQ ID NO: 4974 - RNA, 19 nt, synthetic construct
  source 1..19: mol_type = other RNA
gcagactatgacgtcttta

SEQ ID NO: 4975 - RNA, 19 nt, synthetic construct
  source 1..19: mol_type = other RNA
cagactatgacgtctttag

SEQ ID NO: 4976 - RNA, 19 nt, synthetic construct
  source 1..19: mol_type = other RNA
agactatgacgtctttagc

SEQ ID NO: 4977 - RNA, 19 nt, synthetic construct
  source 1..19: mol_type = other RNA
gactatgacgtctttagct

SEQ ID NO: 4978 - RNA, 19 nt, synthetic construct
  source 1..19: mol_type = other RNA
actatgacgtctttagcta

SEQ ID NO: 4979 - RNA, 19 nt, synthetic construct
  source 1..19: mol_type = other RNA
ctatgacgtctttagctaa

SEQ ID NO: 4980 - RNA, 19 nt, synthetic construct
  source 1..19: mol_type = other RNA
tatgacgtctttagctaat

SEQ ID NO: 4981 - RNA, 19 nt, synthetic construct
  source 1..19: mol_type = other RNA
atgacgtctttagctaatg

SEQ ID NO: 4982 - RNA, 19 nt, synthetic construct
  source 1..19: mol_type = other RNA
tgacgtctttagctaatga

SEQ ID NO: 4983 - RNA, 19 nt, synthetic construct
  source 1..19: mol_type = other RNA
gacgtctttagctaatgaa

SEQ ID NO: 4984 - RNA, 19 nt, synthetic construct
  source 1..19: mol_type = other RNA
acgtctttagctaatgaat

SEQ ID NO: 4985 - RNA, 19 nt, synthetic construct
  source 1..19: mol_type = other RNA
cgtctttagctaatgaatt

SEQ ID NO: 4986 - RNA, 19 nt, synthetic construct
  source 1..19: mol_type = other RNA
gtctttagctaatgaattg

SEQ ID NO: 4987 - RNA, 19 nt, synthetic construct
  source 1..19: mol_type = other RNA
tctttagctaatgaattgc

SEQ ID NO: 4988 - RNA, 19 nt, synthetic construct
  source 1..19: mol_type = other RNA
ctttagctaatgaattgcc

SEQ ID NO: 4989 - RNA, 19 nt, synthetic construct
  source 1..19: mol_type = other RNA
tttagctaatgaattgcct

SEQ ID NO: 4990 - RNA, 19 nt, synthetic construct
  source 1..19: mol_type = other RNA
ttagctaatgaattgccta

SEQ ID NO: 4991 - RNA, 19 nt, synthetic construct
  source 1..19: mol_type = other RNA
tagctaatgaattgcctat

SEQ ID NO: 4992 - RNA, 19 nt, synthetic construct
  source 1..19: mol_type = other RNA
agctaatgaattgcctatt

SEQ ID NO: 4993 - RNA, 19 nt, synthetic construct
  source 1..19: mol_type = other RNA
gctaatgaattgcctattg

SEQ ID NO: 4994 - RNA, 19 nt, synthetic construct
  source 1..19: mol_type = other RNA
ctaatgaattgcctattgt

SEQ ID NO: 4995 - RNA, 19 nt, synthetic construct
  source 1..19: mol_type = other RNA
taatgaattgcctattgtt

SEQ ID NO: 4996 - RNA, 19 nt, synthetic construct
  source 1..19: mol_type = other RNA
aatgaattgcctattgtta

SEQ ID NO: 4997 - RNA, 19 nt, synthetic construct
  source 1..19: mol_type = other RNA
atgaattgcctattgttat

SEQ ID NO: 4998 - RNA, 19 nt, synthetic construct
  source 1..19: mol_type = other RNA
tgaattgcctattgttatg

SEQ ID NO: 4999 - RNA, 19 nt, synthetic construct
  source 1..19: mol_type = other RNA
gaattgcctattgttatgg

SEQ ID NO: 5000 - RNA, 19 nt, synthetic construct
  source 1..19: mol_type = other RNA
aattgcctattgttatgga

SEQ ID NO: 5001 - RNA, 19 nt, synthetic construct
  source 1..19: mol_type = other RNA
attgcctattgttatggaa

SEQ ID NO: 5002 - RNA, 19 nt, synthetic construct
  source 1..19: mol_type = other RNA
ttgcctattgttatggaaa

SEQ ID NO: 5003 - RNA, 19 nt, synthetic construct
  source 1..19: mol_type = other RNA
tgcctattgttatggaaaa

SEQ ID NO: 5004 - RNA, 19 nt, synthetic construct
  source 1..19: mol_type = other RNA
gcctattgttatggaaaac

SEQ ID NO: 5005 - RNA, 19 nt, synthetic construct
  source 1..19: mol_type = other RNA
cctattgttatggaaaaca

SEQ ID NO: 5006 - RNA, 19 nt, synthetic construct
  source 1..19: mol_type = other RNA
ctattgttatggaaaacag

SEQ ID NO: 5007 - RNA, 19 nt, synthetic construct
  source 1..19: mol_type = other RNA
tattgttatggaaaacagt

SEQ ID NO: 5008 - RNA, 19 nt, synthetic construct
  source 1..19: mol_type = other RNA
attgttatggaaaacagtt

SEQ ID NO: 5009 - RNA, 19 nt, synthetic construct
  source 1..19: mol_type = other RNA
ttgttatggaaaacagtta

SEQ ID NO: 5010 - RNA, 19 nt, synthetic construct
  source 1..19: mol_type = other RNA
tgttatggaaaacagttaa

SEQ ID NO: 5011 - RNA, 19 nt, synthetic construct
  source 1..19: mol_type = other RNA
gttatggaaaacagttaat

SEQ ID NO: 5012 - RNA, 19 nt, synthetic construct
  source 1..19: mol_type = other RNA
ttatggaaaacagttaata

SEQ ID NO: 5013 - RNA, 19 nt, synthetic construct
  source 1..19: mol_type = other RNA
tatggaaaacagttaatat

SEQ ID NO: 5014 - RNA, 19 nt, synthetic construct
  source 1..19: mol_type = other RNA
atggaaaacagttaatatg

SEQ ID NO: 5015 - RNA, 19 nt, synthetic construct
  source 1..19: mol_type = other RNA
tggaaaacagttaatatgc

SEQ ID NO: 5016 - RNA, 19 nt, synthetic construct
  source 1..19: mol_type = other RNA
ggaaaacagttaatatgcc

SEQ ID NO: 5017 - RNA, 19 nt, synthetic construct
  source 1..19: mol_type = other RNA
gaaaacagttaatatgcca

SEQ ID NO: 5018 - RNA, 19 nt, synthetic construct
  source 1..19: mol_type = other RNA
aaaacagttaatatgccat

SEQ ID NO: 5019 - RNA, 19 nt, synthetic construct
  source 1..19: mol_type = other RNA
aaacagttaatatgccatg

SEQ ID NO: 5020 - RNA, 19 nt, synthetic construct
  source 1..19: mol_type = other RNA
aacagttaatatgccatgt

SEQ ID NO: 5021 - RNA, 19 nt, synthetic construct
  source 1..19: mol_type = other RNA
acagttaatatgccatgta

SEQ ID NO: 5022 - RNA, 19 nt, synthetic construct
  source 1..19: mol_type = other RNA
cagttaatatgccatgtat

SEQ ID NO: 5023 - RNA, 19 nt, synthetic construct
  source 1..19: mol_type = other RNA
agttaatatgccatgtatg

SEQ ID NO: 5024 - RNA, 19 nt, synthetic construct
  source 1..19: mol_type = other RNA
gttaatatgccatgtatgt

SEQ ID NO: 5025 - RNA, 19 nt, synthetic construct
  source 1..19: mol_type = other RNA
ttaatatgccatgtatgta

SEQ ID NO: 5026 - RNA, 19 nt, synthetic construct
  source 1..19: mol_type = other RNA
taatatgccatgtatgtac

SEQ ID NO: 5027 - RNA, 19 nt, synthetic construct
  source 1..19: mol_type = other RNA
aatatgccatgtatgtaca

SEQ ID NO: 5028 - RNA, 19 nt, synthetic construct
  source 1..19: mol_type = other RNA
atatgccatgtatgtacag

SEQ ID NO: 5029 - RNA, 19 nt, synthetic construct
  source 1..19: mol_type = other RNA
tatgccatgtatgtacagt

SEQ ID NO: 5030 - RNA, 19 nt, synthetic construct
  source 1..19: mol_type = other RNA
atgccatgtatgtacagtt

SEQ ID NO: 5031 - RNA, 19 nt, synthetic construct
  source 1..19: mol_type = other RNA
tgccatgtatgtacagttt

SEQ ID NO: 5032 - RNA, 19 nt, synthetic construct
  source 1..19: mol_type = other RNA
gccatgtatgtacagtttt

SEQ ID NO: 5033 - RNA, 19 nt, synthetic construct
  source 1..19: mol_type = other RNA
ccatgtatgtacagttttg

SEQ ID NO: 5034 - RNA, 19 nt, synthetic construct
  source 1..19: mol_type = other RNA
catgtatgtacagttttgt

SEQ ID NO: 5035 - RNA, 19 nt, synthetic construct
  source 1..19: mol_type = other RNA
atgtatgtacagttttgtt

SEQ ID NO: 5036 - RNA, 19 nt, synthetic construct
  source 1..19: mol_type = other RNA
tgtatgtacagttttgttt

SEQ ID NO: 5037 - RNA, 19 nt, synthetic construct
  source 1..19: mol_type = other RNA
gtatgtacagttttgttta

SEQ ID NO: 5038 - RNA, 19 nt, synthetic construct
  source 1..19: mol_type = other RNA
tatgtacagttttgtttat

SEQ ID NO: 5039 - RNA, 19 nt, synthetic construct
  source 1..19: mol_type = other RNA
atgtacagttttgtttata

SEQ ID NO: 5040 - RNA, 19 nt, synthetic construct
  source 1..19: mol_type = other RNA
tgtacagttttgtttatat

SEQ ID NO: 5041 - RNA, 19 nt, synthetic construct
  source 1..19: mol_type = other RNA
gtacagttttgtttatatt

SEQ ID NO: 5042 - RNA, 19 nt, synthetic construct
  source 1..19: mol_type = other RNA
tacagttttgtttatattg

SEQ ID NO: 5043 - RNA, 19 nt, synthetic construct
  source 1..19: mol_type = other RNA
acagttttgtttatattgt

SEQ ID NO: 5044 - RNA, 19 nt, synthetic construct
  source 1..19: mol_type = other RNA
cagttttgtttatattgta

SEQ ID NO: 5045 - RNA, 19 nt, synthetic construct
  source 1..19: mol_type = other RNA
agttttgtttatattgtat

SEQ ID NO: 5046 - RNA, 19 nt, synthetic construct
  source 1..19: mol_type = other RNA
gttttgtttatattgtata

SEQ ID NO: 5047 - RNA, 19 nt, synthetic construct
  source 1..19: mol_type = other RNA
ttttgtttatattgtatat

SEQ ID NO: 5048 - RNA, 19 nt, synthetic construct
  source 1..19: mol_type = other RNA
tttgtttatattgtatatt

SEQ ID NO: 5049 - RNA, 19 nt, synthetic construct
  source 1..19: mol_type = other RNA
ttgtttatattgtatattt

SEQ ID NO: 5050 - RNA, 19 nt, synthetic construct
  source 1..19: mol_type = other RNA
tgtttatattgtatattta

SEQ ID NO: 5051 - RNA, 19 nt, synthetic construct
  source 1..19: mol_type = other RNA
gtttatattgtatatttaa

SEQ ID NO: 5052 - RNA, 19 nt, synthetic construct
  source 1..19: mol_type = other RNA
tttatattgtatatttaaa

SEQ ID NO: 5053 - RNA, 19 nt, synthetic construct
  source 1..19: mol_type = other RNA
ttatattgtatatttaaag

SEQ ID NO: 5054 - RNA, 19 nt, synthetic construct
  source 1..19: mol_type = other RNA
tatattgtatatttaaaga

SEQ ID NO: 5055 - RNA, 19 nt, synthetic construct
  source 1..19: mol_type = other RNA
atattgtatatttaaagat

SEQ ID NO: 5056 - RNA, 19 nt, synthetic construct
  source 1..19: mol_type = other RNA
tattgtatatttaaagata

SEQ ID NO: 5057 - RNA, 19 nt, synthetic construct
  source 1..19: mol_type = other RNA
attgtatatttaaagatac

SEQ ID NO: 5058 - RNA, 19 nt, synthetic construct
  source 1..19: mol_type = other RNA
ttgtatatttaaagatact

SEQ ID NO: 5059 - RNA, 19 nt, synthetic construct
  source 1..19: mol_type = other RNA
tgtatatttaaagatactg

SEQ ID NO: 5060 - RNA, 19 nt, synthetic construct
  source 1..19: mol_type = other RNA
gtatatttaaagatactgc

SEQ ID NO: 5061 - RNA, 19 nt, synthetic construct
  source 1..19: mol_type = other RNA
tatatttaaagatactgct

SEQ ID NO: 5062 - RNA, 19 nt, synthetic construct
  source 1..19: mol_type = other RNA
atatttaaagatactgcta

SEQ ID NO: 5063 - RNA, 19 nt, synthetic construct
  source 1..19: mol_type = other RNA
tatttaaagatactgctaa

SEQ ID NO: 5064 - RNA, 19 nt, synthetic construct
  source 1..19: mol_type = other RNA
atttaaagatactgctaat

SEQ ID NO: 5065 - RNA, 19 nt, synthetic construct
  source 1..19: mol_type = other RNA
tttaaagatactgctaata

SEQ ID NO: 5066 - RNA, 19 nt, synthetic construct
  source 1..19: mol_type = other RNA
ttaaagatactgctaataa

SEQ ID NO: 5067 - RNA, 19 nt, synthetic construct
  source 1..19: mol_type = other RNA
taaagatactgctaataac

SEQ ID NO: 5068 - RNA, 19 nt, synthetic construct
  source 1..19: mol_type = other RNA
aaagatactgctaataacc

SEQ ID NO: 5069 - RNA, 19 nt, synthetic construct
  source 1..19: mol_type = other RNA
aagatactgctaataacct

SEQ ID NO: 5070 - RNA, 19 nt, synthetic construct
  source 1..19: mol_type = other RNA
agatactgctaataaccta

SEQ ID NO: 5071 - RNA, 19 nt, synthetic construct
  source 1..19: mol_type = other RNA
gatactgctaataacctat

SEQ ID NO: 5072 - RNA, 19 nt, synthetic construct
  source 1..19: mol_type = other RNA
atactgctaataacctata

SEQ ID NO: 5073 - RNA, 19 nt, synthetic construct
  source 1..19: mol_type = other RNA
tactgctaataacctatat

SEQ ID NO: 5074 - RNA, 19 nt, synthetic construct
  source 1..19: mol_type = other RNA
actgctaataacctatata

SEQ ID NO: 5075 - RNA, 19 nt, synthetic construct
  source 1..19: mol_type = other RNA
ctgctaataacctatataa

SEQ ID NO: 5076 - RNA, 19 nt, synthetic construct
  source 1..19: mol_type = other RNA
tgctaataacctatataaa

SEQ ID NO: 5077 - RNA, 19 nt, synthetic construct
  source 1..19: mol_type = other RNA
gctaataacctatataaat

SEQ ID NO: 5078 - RNA, 19 nt, synthetic construct
  source 1..19: mol_type = other RNA
ctaataacctatataaatt

SEQ ID NO: 5079 - RNA, 19 nt, synthetic construct
  source 1..19: mol_type = other RNA
taataacctatataaattt

SEQ ID NO: 5080 - RNA, 19 nt, synthetic construct
  source 1..19: mol_type = other RNA
aataacctatataaattta

SEQ ID NO: 5081 - RNA, 19 nt, synthetic construct
  source 1..19: mol_type = other RNA
ataacctatataaatttaa

SEQ ID NO: 5082 - RNA, 19 nt, synthetic construct
  source 1..19: mol_type = other RNA
taacctatataaatttaag

SEQ ID NO: 5083 - RNA, 19 nt, synthetic construct
  source 1..19: mol_type = other RNA
aacctatataaatttaagt

SEQ ID NO: 5084 - RNA, 19 nt, synthetic construct
  source 1..19: mol_type = other RNA
acctatataaatttaagtg

SEQ ID NO: 5085 - RNA, 19 nt, synthetic construct
  source 1..19: mol_type = other RNA
cctatataaatttaagtga

SEQ ID NO: 5086 - RNA, 19 nt, synthetic construct
  source 1..19: mol_type = other RNA
ctatataaatttaagtgac

SEQ ID NO: 5087 - RNA, 19 nt, synthetic construct
  source 1..19: mol_type = other RNA
tatataaatttaagtgact

SEQ ID NO: 5088 - RNA, 19 nt, synthetic construct
  source 1..19: mol_type = other RNA
atataaatttaagtgactt

SEQ ID NO: 5089 - RNA, 19 nt, synthetic construct
  source 1..19: mol_type = other RNA
tataaatttaagtgacttg

SEQ ID NO: 5090 - RNA, 19 nt, synthetic construct
  source 1..19: mol_type = other RNA
ataaatttaagtgacttga

SEQ ID NO: 5091 - RNA, 19 nt, synthetic construct
  source 1..19: mol_type = other RNA
taaatttaagtgacttgag

SEQ ID NO: 5092 - RNA, 19 nt, synthetic construct
  source 1..19: mol_type = other RNA
aaatttaagtgacttgagg

SEQ ID NO: 5093 - RNA, 19 nt, synthetic construct
  source 1..19: mol_type = other RNA
aatttaagtgacttgaggc

SEQ ID NO: 5094 - RNA, 19 nt, synthetic construct
  source 1..19: mol_type = other RNA
atttaagtgacttgaggcc

SEQ ID NO: 5095 - RNA, 19 nt, synthetic construct
  source 1..19: mol_type = other RNA
tttaagtgacttgaggcct

SEQ ID NO: 5096 - RNA, 19 nt, synthetic construct
  source 1..19: mol_type = other RNA
ttaagtgacttgaggccta

SEQ ID NO: 5097 - RNA, 19 nt, synthetic construct
  source 1..19: mol_type = other RNA
taagtgacttgaggcctat

SEQ ID NO: 5098 - RNA, 19 nt, synthetic construct
  source 1..19: mol_type = other RNA
aagtgacttgaggcctata

SEQ ID NO: 5099 - RNA, 19 nt, synthetic construct
  source 1..19: mol_type = other RNA
agtgacttgaggcctataa

SEQ ID NO: 5100 - RNA, 19 nt, synthetic construct
  source 1..19: mol_type = other RNA
gtgacttgaggcctataat

SEQ ID NO: 5101 - RNA, 19 nt, synthetic construct
  source 1..19: mol_type = other RNA
tgacttgaggcctataata

SEQ ID NO: 5102 - RNA, 19 nt, synthetic construct
  source 1..19: mol_type = other RNA
gacttgaggcctataatac

SEQ ID NO: 5103 - RNA, 19 nt, synthetic construct
  source 1..19: mol_type = other RNA
acttgaggcctataataca

SEQ ID NO: 5104 - RNA, 19 nt, synthetic construct
  source 1..19: mol_type = other RNA
cttgaggcctataatacaa

SEQ ID NO: 5105 - RNA, 19 nt, synthetic construct
  source 1..19: mol_type = other RNA
ttgaggcctataatacaat

SEQ ID NO: 5106 - RNA, 19 nt, synthetic construct
  source 1..19: mol_type = other RNA
tgaggcctataatacaatc

SEQ ID NO: 5107 - RNA, 19 nt, synthetic construct
  source 1..19: mol_type = other RNA
gaggcctataatacaatct

SEQ ID NO: 5108 - RNA, 19 nt, synthetic construct
  source 1..19: mol_type = other RNA
aggcctataatacaatctg

SEQ ID NO: 5109 - RNA, 19 nt, synthetic construct
  source 1..19: mol_type = other RNA
ggcctataatacaatctgc

SEQ ID NO: 5110 - RNA, 19 nt, synthetic construct
  source 1..19: mol_type = other RNA
gcctataatacaatctgct

SEQ ID NO: 5111 - RNA, 19 nt, synthetic construct
  source 1..19: mol_type = other RNA
cctataatacaatctgcta

SEQ ID NO: 5112 - RNA, 19 nt, synthetic construct
  source 1..19: mol_type = other RNA
ctataatacaatctgctac

SEQ ID NO: 5113 - RNA, 19 nt, synthetic construct
  source 1..19: mol_type = other RNA
tataatacaatctgctact

SEQ ID NO: 5114 - RNA, 19 nt, synthetic construct
  source 1..19: mol_type = other RNA
ataatacaatctgctactt

SEQ ID NO: 5115 - RNA, 19 nt, synthetic construct
  source 1..19: mol_type = other RNA
taatacaatctgctacttt

SEQ ID NO: 5116 - RNA, 19 nt, synthetic construct
  source 1..19: mol_type = other RNA
aatacaatctgctacttta

SEQ ID NO: 5117 - RNA, 19 nt, synthetic construct
  source 1..19: mol_type = other RNA
atacaatctgctactttac

SEQ ID NO: 5118 - RNA, 19 nt, synthetic construct
  source 1..19: mol_type = other RNA
tacaatctgctactttact

SEQ ID NO: 5119 - RNA, 19 nt, synthetic construct
  source 1..19: mol_type = other RNA
acaatctgctactttacta

SEQ ID NO: 5120 - RNA, 19 nt, synthetic construct
  source 1..19: mol_type = other RNA
caatctgctactttactaa

SEQ ID NO: 5121 - RNA, 19 nt, synthetic construct
  source 1..19: mol_type = other RNA
aatctgctactttactaat

SEQ ID NO: 5122 - RNA, 19 nt, synthetic construct
  source 1..19: mol_type = other RNA
atctgctactttactaatt

SEQ ID NO: 5123 - RNA, 19 nt, synthetic construct
  source 1..19: mol_type = other RNA
tctgctactttactaattc

SEQ ID NO: 5124 - RNA, 19 nt, synthetic construct
  source 1..19: mol_type = other RNA
ctgctactttactaattca

SEQ ID NO: 5125 - RNA, 19 nt, synthetic construct
  source 1..19: mol_type = other RNA
tgctactttactaattcat

SEQ ID NO: 5126 - RNA, 19 nt, synthetic construct
  source 1..19: mol_type = other RNA
gctactttactaattcata

SEQ ID NO: 5127 - RNA, 19 nt, synthetic construct
  source 1..19: mol_type = other RNA
ctactttactaattcataa

SEQ ID NO: 5128 - RNA, 19 nt, synthetic construct
  source 1..19: mol_type = other RNA
tactttactaattcataaa

SEQ ID NO: 5129 - RNA, 19 nt, synthetic construct
  source 1..19: mol_type = other RNA
actttactaattcataaat

SEQ ID NO: 5130 - RNA, 19 nt, synthetic construct
  source 1..19: mol_type = other RNA
ctttactaattcataaatt

SEQ ID NO: 5131 - RNA, 19 nt, synthetic construct
  source 1..19: mol_type = other RNA
tttactaattcataaattc

SEQ ID NO: 5132 - RNA, 19 nt, synthetic construct
  source 1..19: mol_type = other RNA
ttactaattcataaattca

SEQ ID NO: 5133 - RNA, 19 nt, synthetic construct
  source 1..19: mol_type = other RNA
tactaattcataaattcaa

SEQ ID NO: 5134 - RNA, 19 nt, synthetic construct
  source 1..19: mol_type = other RNA
actaattcataaattcaaa

SEQ ID NO: 5135 - RNA, 19 nt, synthetic construct
  source 1..19: mol_type = other RNA
ctaattcataaattcaaaa

SEQ ID NO: 5136 - RNA, 19 nt, synthetic construct
  source 1..19: mol_type = other RNA
taattcataaattcaaaaa

SEQ ID NO: 5137 - RNA, 19 nt, synthetic construct
  source 1..19: mol_type = other RNA
aattcataaattcaaaaaa

SEQ ID NO: 5138 - RNA, 19 nt, synthetic construct
  source 1..19: mol_type = other RNA
attcataaattcaaaaaaa

SEQ ID NO: 5139 - RNA, 19 nt, synthetic construct
  source 1..19: mol_type = other RNA
ttcataaattcaaaaaaaa

SEQ ID NO: 5140 - RNA, 19 nt, synthetic construct
  source 1..19: mol_type = other RNA
tcataaattcaaaaaaaat

SEQ ID NO: 5141 - RNA, 19 nt, synthetic construct
  source 1..19: mol_type = other RNA
cataaattcaaaaaaaatt

SEQ ID NO: 5142 - RNA, 19 nt, synthetic construct
  source 1..19: mol_type = other RNA
ataaattcaaaaaaaattc

SEQ ID NO: 5143 - RNA, 19 nt, synthetic construct
  source 1..19: mol_type = other RNA
taaattcaaaaaaaattct

SEQ ID NO: 5144 - RNA, 19 nt, synthetic construct
  source 1..19: mol_type = other RNA
aaattcaaaaaaaattcta

SEQ ID NO: 5145 - RNA, 19 nt, synthetic construct
  source 1..19: mol_type = other RNA
aattcaaaaaaaattctat

SEQ ID NO: 5146 - RNA, 19 nt, synthetic construct
  source 1..19: mol_type = other RNA
attcaaaaaaaattctatg

SEQ ID NO: 5147 - RNA, 19 nt, synthetic construct
  source 1..19: mol_type = other RNA
ttcaaaaaaaattctatgg

SEQ ID NO: 5148 - RNA, 19 nt, synthetic construct
  source 1..19: mol_type = other RNA
tcaaaaaaaattctatggc

SEQ ID NO: 5149 - RNA, 19 nt, synthetic construct
  source 1..19: mol_type = other RNA
caaaaaaaattctatggca

SEQ ID NO: 5150 - RNA, 19 nt, synthetic construct
  source 1..19: mol_type = other RNA
aaaaaaaattctatggcat

SEQ ID NO: 5151 - RNA, 19 nt, synthetic construct
  source 1..19: mol_type = other RNA
aaaaaaattctatggcata

SEQ ID NO: 5152 - RNA, 19 nt, synthetic construct
  source 1..19: mol_type = other RNA
aaaaaattctatggcatag

SEQ ID NO: 5153 - RNA, 19 nt, synthetic construct
  source 1..19: mol_type = other RNA
aaaaattctatggcatagg

SEQ ID NO: 5154 - RNA, 19 nt, synthetic construct
  source 1..19: mol_type = other RNA
aaaattctatggcatagga

SEQ ID NO: 5155 - RNA, 19 nt, synthetic construct
  source 1..19: mol_type = other RNA
aaattctatggcataggaa

SEQ ID NO: 5156 - RNA, 19 nt, synthetic construct
  source 1..19: mol_type = other RNA
aattctatggcataggaac

SEQ ID NO: 5157 - RNA, 19 nt, synthetic construct
  source 1..19: mol_type = other RNA
attctatggcataggaacc

SEQ ID NO: 5158 - RNA, 19 nt, synthetic construct
  source 1..19: mol_type = other RNA
ttctatggcataggaacca

SEQ ID NO: 5159 - RNA, 19 nt, synthetic construct
  source 1..19: mol_type = other RNA
tctatggcataggaaccaa

SEQ ID NO: 5160 - RNA, 19 nt, synthetic construct
  source 1..19: mol_type = other RNA
ctatggcataggaaccaac

SEQ ID NO: 5161 - RNA, 19 nt, synthetic construct
  source 1..19: mol_type = other RNA
tatggcataggaaccaact

SEQ ID NO: 5162 - RNA, 19 nt, synthetic construct
  source 1..19: mol_type = other RNA
atggcataggaaccaactg

SEQ ID NO: 5163 - RNA, 19 nt, synthetic construct
  source 1..19: mol_type = other RNA
tggcataggaaccaactgc

SEQ ID NO: 5164 - RNA, 19 nt, synthetic construct
  source 1..19: mol_type = other RNA
ggcataggaaccaactgcc

SEQ ID NO: 5165 - RNA, 19 nt, synthetic construct
  source 1..19: mol_type = other RNA
gcataggaaccaactgcct

SEQ ID NO: 5166 - RNA, 19 nt, synthetic construct
  source 1..19: mol_type = other RNA
cataggaaccaactgcctt

SEQ ID NO: 5167 - RNA, 19 nt, synthetic construct
  source 1..19: mol_type = other RNA
ataggaaccaactgccttg

SEQ ID NO: 5168 - RNA, 19 nt, synthetic construct
  source 1..19: mol_type = other RNA
taggaaccaactgccttgc

SEQ ID NO: 5169 - RNA, 19 nt, synthetic construct
  source 1..19: mol_type = other RNA
aggaaccaactgccttgcc

SEQ ID NO: 5170 - RNA, 19 nt, synthetic construct
  source 1..19: mol_type = other RNA
ggaaccaactgccttgcct

SEQ ID NO: 5171 - RNA, 19 nt, synthetic construct
  source 1..19: mol_type = other RNA
gaaccaactgccttgcctt

SEQ ID NO: 5172 - RNA, 19 nt, synthetic construct
  source 1..19: mol_type = other RNA
aaccaactgccttgccttc

SEQ ID NO: 5173 - RNA, 19 nt, synthetic construct
  source 1..19: mol_type = other RNA
accaactgccttgccttca

SEQ ID NO: 5174 - RNA, 19 nt, synthetic construct
  source 1..19: mol_type = other RNA
ccaactgccttgccttcaa

SEQ ID NO: 5175 - RNA, 19 nt, synthetic construct
  source 1..19: mol_type = other RNA
caactgccttgccttcaag

SEQ ID NO: 5176 - RNA, 19 nt, synthetic construct
  source 1..19: mol_type = other RNA
aactgccttgccttcaaga

SEQ ID NO: 5177 - RNA, 19 nt, synthetic construct
  source 1..19: mol_type = other RNA
actgccttgccttcaagac

SEQ ID NO: 5178 - RNA, 19 nt, synthetic construct
  source 1..19: mol_type = other RNA
ctgccttgccttcaagacc

SEQ ID NO: 5179 - RNA, 19 nt, synthetic construct
  source 1..19: mol_type = other RNA
tgccttgccttcaagacct

SEQ ID NO: 5180 - RNA, 19 nt, synthetic construct
  source 1..19: mol_type = other RNA
gccttgccttcaagaccta

SEQ ID NO: 5181 - RNA, 19 nt, synthetic construct
  source 1..19: mol_type = other RNA
ccttgccttcaagacctag

SEQ ID NO: 5182 - RNA, 19 nt, synthetic construct
  source 1..19: mol_type = other RNA
cttgccttcaagacctagt

SEQ ID NO: 5183 - RNA, 19 nt, synthetic construct
  source 1..19: mol_type = other RNA
ttgccttcaagacctagta

SEQ ID NO: 5184 - RNA, 19 nt, synthetic construct
  source 1..19: mol_type = other RNA
tgccttcaagacctagtaa

SEQ ID NO: 5185 - RNA, 19 nt, synthetic construct
  source 1..19: mol_type = other RNA
gccttcaagacctagtaac

SEQ ID NO: 5186 - RNA, 19 nt, synthetic construct
  source 1..19: mol_type = other RNA
ccttcaagacctagtaact

SEQ ID NO: 5187 - RNA, 19 nt, synthetic construct
  source 1..19: mol_type = other RNA
cttcaagacctagtaactt

SEQ ID NO: 5188 - RNA, 19 nt, synthetic construct
  source 1..19: mol_type = other RNA
ttcaagacctagtaacttt

SEQ ID NO: 5189 - RNA, 19 nt, synthetic construct
  source 1..19: mol_type = other RNA
tcaagacctagtaactttc

SEQ ID NO: 5190 - RNA, 19 nt, synthetic construct
  source 1..19: mol_type = other RNA
caagacctagtaactttct

SEQ ID NO: 5191 - RNA, 19 nt, synthetic construct
  source 1..19: mol_type = other RNA
aagacctagtaactttctc

SEQ ID NO: 5192 - RNA, 19 nt, synthetic construct
  source 1..19: mol_type = other RNA
agacctagtaactttctct

SEQ ID NO: 5193 - RNA, 19 nt, synthetic construct
  source 1..19: mol_type = other RNA
gacctagtaactttctcta

SEQ ID NO: 5194 - RNA, 19 nt, synthetic construct
  source 1..19: mol_type = other RNA
acctagtaactttctctat

SEQ ID NO: 5195 - RNA, 19 nt, synthetic construct
  source 1..19: mol_type = other RNA
cctagtaactttctctata

SEQ ID NO: 5196 - RNA, 19 nt, synthetic construct
  source 1..19: mol_type = other RNA
ctagtaactttctctataa

SEQ ID NO: 5197 - RNA, 19 nt, synthetic construct
  source 1..19: mol_type = other RNA
tagtaactttctctataaa

SEQ ID NO: 5198 - RNA, 19 nt, synthetic construct
  source 1..19: mol_type = other RNA
agtaactttctctataaat

SEQ ID NO: 5199 - RNA, 19 nt, synthetic construct
  source 1..19: mol_type = other RNA
gtaactttctctataaatc

SEQ ID NO: 5200 - RNA, 19 nt, synthetic construct
  source 1..19: mol_type = other RNA
taactttctctataaatct

SEQ ID NO: 5201 - RNA, 19 nt, synthetic construct
  source 1..19: mol_type = other RNA
aactttctctataaatctc

SEQ ID NO: 5202 - RNA, 19 nt, synthetic construct
  source 1..19: mol_type = other RNA
actttctctataaatctcg

SEQ ID NO: 5203 - RNA, 19 nt, synthetic construct
  source 1..19: mol_type = other RNA
ctttctctataaatctcgt

SEQ ID NO: 5204 - RNA, 19 nt, synthetic construct
  source 1..19: mol_type = other RNA
tttctctataaatctcgtg

SEQ ID NO: 5205 - RNA, 19 nt, synthetic construct
  source 1..19: mol_type = other RNA
ttctctataaatctcgtgt

SEQ ID NO: 5206 - RNA, 19 nt, synthetic construct
  source 1..19: mol_type = other RNA
tctctataaatctcgtgtt

SEQ ID NO: 5207 - RNA, 19 nt, synthetic construct
  source 1..19: mol_type = other RNA
ctctataaatctcgtgtta

SEQ ID NO: 5208 - RNA, 19 nt, synthetic construct
  source 1..19: mol_type = other RNA
tctataaatctcgtgttaa

SEQ ID NO: 5209 - RNA, 19 nt, synthetic construct
  source 1..19: mol_type = other RNA
ctataaatctcgtgttaac

SEQ ID NO: 5210 - RNA, 19 nt, synthetic construct
  source 1..19: mol_type = other RNA
tataaatctcgtgttaact

SEQ ID NO: 5211 - RNA, 19 nt, synthetic construct
  source 1..19: mol_type = other RNA
ataaatctcgtgttaactg

SEQ ID NO: 5212 - RNA, 19 nt, synthetic construct
  source 1..19: mol_type = other RNA
taaatctcgtgttaactga

SEQ ID NO: 5213 - RNA, 19 nt, synthetic construct
  source 1..19: mol_type = other RNA
aaatctcgtgttaactgaa

SEQ ID NO: 5214 - RNA, 19 nt, synthetic construct
  source 1..19: mol_type = other RNA
aatctcgtgttaactgaaa

SEQ ID NO: 5215 - RNA, 19 nt, synthetic construct
  source 1..19: mol_type = other RNA
atctcgtgttaactgaaat

SEQ ID NO: 5216 - RNA, 19 nt, synthetic construct
  source 1..19: mol_type = other RNA
tctcgtgttaactgaaatt

SEQ ID NO: 5217 - RNA, 19 nt, synthetic construct
  source 1..19: mol_type = other RNA
ctcgtgttaactgaaattt

SEQ ID NO: 5218 - RNA, 19 nt, synthetic construct
  source 1..19: mol_type = other RNA
tcgtgttaactgaaatttt

SEQ ID NO: 5219 - RNA, 19 nt, synthetic construct
  source 1..19: mol_type = other RNA
cgtgttaactgaaattttt

SEQ ID NO: 5220 - RNA, 19 nt, synthetic construct
  source 1..19: mol_type = other RNA
gtgttaactgaaatttttt

SEQ ID NO: 5221 - RNA, 19 nt, synthetic construct
  source 1..19: mol_type = other RNA
tgttaactgaaattttttt

SEQ ID NO: 5222 - RNA, 19 nt, synthetic construct
  source 1..19: mol_type = other RNA
gttaactgaaatttttttt

SEQ ID NO: 5223 - RNA, 19 nt, synthetic construct
  source 1..19: mol_type = other RNA
ttaactgaaatttttttta

SEQ ID NO: 5224 - RNA, 19 nt, synthetic construct
  source 1..19: mol_type = other RNA
taactgaaattttttttaa

SEQ ID NO: 5225 - RNA, 19 nt, synthetic construct
  source 1..19: mol_type = other RNA
aactgaaattttttttaaa

SEQ ID NO: 5226 - RNA, 19 nt, synthetic construct
  source 1..19: mol_type = other RNA
actgaaattttttttaaat

SEQ ID NO: 5227 - RNA, 19 nt, synthetic construct
  source 1..19: mol_type = other RNA
ctgaaattttttttaaata

SEQ ID NO: 5228 - RNA, 19 nt, synthetic construct
  source 1..19: mol_type = other RNA
tgaaattttttttaaatat

SEQ ID NO: 5229 - RNA, 19 nt, synthetic construct
  source 1..19: mol_type = other RNA
gaaattttttttaaatata

SEQ ID NO: 5230 - RNA, 19 nt, synthetic construct
  source 1..19: mol_type = other RNA
aaattttttttaaatatat

SEQ ID NO: 5231 - RNA, 19 nt, synthetic construct
  source 1..19: mol_type = other RNA
aattttttttaaatatatt

SEQ ID NO: 5232 - RNA, 19 nt, synthetic construct
  source 1..19: mol_type = other RNA
attttttttaaatatattt

SEQ ID NO: 5233 - RNA, 19 nt, synthetic construct
  source 1..19: mol_type = other RNA
ttttttttaaatatatttt

SEQ ID NO: 5234 - RNA, 19 nt, synthetic construct
  source 1..19: mol_type = other RNA
tttttttaaatatattttt

SEQ ID NO: 5235 - RNA, 19 nt, synthetic construct
  source 1..19: mol_type = other RNA
ttttttaaatatatttttt

SEQ ID NO: 5236 - RNA, 19 nt, synthetic construct
  source 1..19: mol_type = other RNA
tttttaaatatatttttta

SEQ ID NO: 5237 - RNA, 19 nt, synthetic construct
  source 1..19: mol_type = other RNA
ttttaaatatattttttag

SEQ ID NO: 5238 - RNA, 19 nt, synthetic construct
  source 1..19: mol_type = other RNA
tttaaatatattttttaga

SEQ ID NO: 5239 - RNA, 19 nt, synthetic construct
  source 1..19: mol_type = other RNA
ttaaatatattttttagat

SEQ ID NO: 5240 - RNA, 19 nt, synthetic construct
  source 1..19: mol_type = other RNA
taaatatattttttagatt

SEQ ID NO: 5241 - RNA, 19 nt, synthetic construct
  source 1..19: mol_type = other RNA
aaatatattttttagattg

SEQ ID NO: 5242 - RNA, 19 nt, synthetic construct
  source 1..19: mol_type = other RNA
aatatattttttagattgg

SEQ ID NO: 5243 - RNA, 19 nt, synthetic construct
  source 1..19: mol_type = other RNA
atatattttttagattggt

SEQ ID NO: 5244 - RNA, 19 nt, synthetic construct
  source 1..19: mol_type = other RNA
tatattttttagattggta

SEQ ID NO: 5245 - RNA, 19 nt, synthetic construct
  source 1..19: mol_type = other RNA
atattttttagattggtaa

SEQ ID NO: 5246 - RNA, 19 nt, synthetic construct
  source 1..19: mol_type = other RNA
tattttttagattggtaat

SEQ ID NO: 5247 - RNA, 19 nt, synthetic construct
  source 1..19: mol_type = other RNA
attttttagattggtaata

SEQ ID NO: 5248 - RNA, 19 nt, synthetic construct
  source 1..19: mol_type = other RNA
ttttttagattggtaatat

SEQ ID NO: 5249 - RNA, 19 nt, synthetic construct
  source 1..19: mol_type = other RNA
tttttagattggtaatatt

SEQ ID NO: 5250 - RNA, 19 nt, synthetic construct
  source 1..19: mol_type = other RNA
ttttagattggtaatattt

SEQ ID NO: 5251 - RNA, 19 nt, synthetic construct
  source 1..19: mol_type = other RNA
tttagattggtaatattta

SEQ ID NO: 5252 - RNA, 19 nt, synthetic construct
  source 1..19: mol_type = other RNA
ttagattggtaatatttaa

SEQ ID NO: 5253 - RNA, 19 nt, synthetic construct
  source 1..19: mol_type = other RNA
tagattggtaatatttaaa

SEQ ID NO: 5254 - RNA, 19 nt, synthetic construct
  source 1..19: mol_type = other RNA
agattggtaatatttaaac

SEQ ID NO: 5255 - RNA, 19 nt, synthetic construct
  source 1..19: mol_type = other RNA
gattggtaatatttaaacc

SEQ ID NO: 5256 - RNA, 19 nt, synthetic construct
  source 1..19: mol_type = other RNA
attggtaatatttaaacca

SEQ ID NO: 5257 - RNA, 19 nt, synthetic construct
  source 1..19: mol_type = other RNA
ttggtaatatttaaaccag

SEQ ID NO: 5258 - RNA, 19 nt, synthetic construct
  source 1..19: mol_type = other RNA
tggtaatatttaaaccagc

SEQ ID NO: 5259 - RNA, 19 nt, synthetic construct
  source 1..19: mol_type = other RNA
ggtaatatttaaaccagca

SEQ ID NO: 5260 - RNA, 19 nt, synthetic construct
  source 1..19: mol_type = other RNA
gtaatatttaaaccagcaa

SEQ ID NO: 5261 - RNA, 19 nt, synthetic construct
  source 1..19: mol_type = other RNA
taatatttaaaccagcaaa

SEQ ID NO: 5262 - RNA, 19 nt, synthetic construct
  source 1..19: mol_type = other RNA
aatatttaaaccagcaaat

SEQ ID NO: 5263 - RNA, 19 nt, synthetic construct
  source 1..19: mol_type = other RNA
atatttaaaccagcaaata

SEQ ID NO: 5264 - RNA, 19 nt, synthetic construct
  source 1..19: mol_type = other RNA
tatttaaaccagcaaatac

SEQ ID NO: 5265 - RNA, 19 nt, synthetic construct
  source 1..19: mol_type = other RNA
atttaaaccagcaaatact

SEQ ID NO: 5266 - RNA, 19 nt, synthetic construct
  source 1..19: mol_type = other RNA
tttaaaccagcaaatactt

SEQ ID NO: 5267 - RNA, 19 nt, synthetic construct
  source 1..19: mol_type = other RNA
ttaaaccagcaaatactta

SEQ ID NO: 5268 - RNA, 19 nt, synthetic construct
  source 1..19: mol_type = other RNA
taaaccagcaaatacttaa

SEQ ID NO: 5269 - RNA, 19 nt, synthetic construct
  source 1..19: mol_type = other RNA
aaaccagcaaatacttaaa

SEQ ID NO: 5270 - RNA, 19 nt, synthetic construct
  source 1..19: mol_type = other RNA
aaccagcaaatacttaaag

SEQ ID NO: 5271 - RNA, 19 nt, synthetic construct
  source 1..19: mol_type = other RNA
accagcaaatacttaaagc

SEQ ID NO: 5272 - RNA, 19 nt, synthetic construct
  source 1..19: mol_type = other RNA
ccagcaaatacttaaagct

SEQ ID NO: 5273 - RNA, 19 nt, synthetic construct
  source 1..19: mol_type = other RNA
cagcaaatacttaaagctt

SEQ ID NO: 5274 - RNA, 19 nt, synthetic construct
  source 1..19: mol_type = other RNA
agcaaatacttaaagcttt

SEQ ID NO: 5275 - RNA, 19 nt, synthetic construct
  source 1..19: mol_type = other RNA
gcaaatacttaaagcttta

SEQ ID NO: 5276 - RNA, 19 nt, synthetic construct
  source 1..19: mol_type = other RNA
caaatacttaaagctttat

SEQ ID NO: 5277 - RNA, 19 nt, synthetic construct
  source 1..19: mol_type = other RNA
aaatacttaaagctttatt

SEQ ID NO: 5278 - RNA, 19 nt, synthetic construct
  source 1..19: mol_type = other RNA
aatacttaaagctttatta

SEQ ID NO: 5279 - RNA, 19 nt, synthetic construct
  source 1..19: mol_type = other RNA
atacttaaagctttattaa

SEQ ID NO: 5280 - RNA, 19 nt, synthetic construct
  source 1..19: mol_type = other RNA
tacttaaagctttattaaa

SEQ ID NO: 5281 - RNA, 19 nt, synthetic construct
  source 1..19: mol_type = other RNA
acttaaagctttattaaac

SEQ ID NO: 5282 - RNA, 19 nt, synthetic construct
  source 1..19: mol_type = other RNA
cttaaagctttattaaaca

SEQ ID NO: 5283 - RNA, 19 nt, synthetic construct
  source 1..19: mol_type = other RNA
ttaaagctttattaaacat

SEQ ID NO: 5284 - RNA, 19 nt, synthetic construct
  source 1..19: mol_type = other RNA
taaagctttattaaacatt

SEQ ID NO: 5285 - RNA, 19 nt, synthetic construct
  source 1..19: mol_type = other RNA
aaagctttattaaacattt

SEQ ID NO: 5286 - RNA, 19 nt, synthetic construct
  source 1..19: mol_type = other RNA
aagctttattaaacatttt

SEQ ID NO: 5287 - RNA, 19 nt, synthetic construct
  source 1..19: mol_type = other RNA
agctttattaaacatttta

SEQ ID NO: 5288 - RNA, 19 nt, synthetic construct
  source 1..19: mol_type = other RNA
gctttattaaacattttaa

SEQ ID NO: 5289 - RNA, 19 nt, synthetic construct
  source 1..19: mol_type = other RNA
ctttattaaacattttaat

SEQ ID NO: 5290 - RNA, 19 nt, synthetic construct
  source 1..19: mol_type = other RNA
tttattaaacattttaatc

SEQ ID NO: 5291 - RNA, 19 nt, synthetic construct
  source 1..19: mol_type = other RNA
ttattaaacattttaatca

SEQ ID NO: 5292 - RNA, 19 nt, synthetic construct
  source 1..19: mol_type = other RNA
tattaaacattttaatcag

SEQ ID NO: 5293 - RNA, 19 nt, synthetic construct
  source 1..19: mol_type = other RNA
attaaacattttaatcaga

SEQ ID NO: 5294 - RNA, 19 nt, synthetic construct
  source 1..19: mol_type = other RNA
ttaaacattttaatcagat

SEQ ID NO: 5295 - RNA, 19 nt, synthetic construct
  source 1..19: mol_type = other RNA
taaacattttaatcagata

SEQ ID NO: 5296 - RNA, 19 nt, synthetic construct
  source 1..19: mol_type = other RNA
aaacattttaatcagataa

SEQ ID NO: 5297 - RNA, 19 nt, synthetic construct
  source 1..19: mol_type = other RNA
aacattttaatcagataag

SEQ ID NO: 5298 - RNA, 19 nt, synthetic construct
  source 1..19: mol_type = other RNA
acattttaatcagataagt

SEQ ID NO: 5299 - RNA, 19 nt, synthetic construct
  source 1..19: mol_type = other RNA
cattttaatcagataagtg

SEQ ID NO: 5300 - RNA, 19 nt, synthetic construct
  source 1..19: mol_type = other RNA
attttaatcagataagtga

SEQ ID NO: 5301 - RNA, 19 nt, synthetic construct
  source 1..19: mol_type = other RNA
ttttaatcagataagtgag

SEQ ID NO: 5302 - RNA, 19 nt, synthetic construct
  source 1..19: mol_type = other RNA
tttaatcagataagtgagt

SEQ ID NO: 5303 - RNA, 19 nt, synthetic construct
  source 1..19: mol_type = other RNA
ttaatcagataagtgagta

SEQ ID NO: 5304 - RNA, 19 nt, synthetic construct
  source 1..19: mol_type = other RNA
taatcagataagtgagtaa

SEQ ID NO: 5305 - RNA, 19 nt, synthetic construct
  source 1..19: mol_type = other RNA
aatcagataagtgagtaaa

SEQ ID NO: 5306 - RNA, 19 nt, synthetic construct
  source 1..19: mol_type = other RNA
atcagataagtgagtaaag

SEQ ID NO: 5307 - RNA, 19 nt, synthetic construct
  source 1..19: mol_type = other RNA
tcagataagtgagtaaagc

SEQ ID NO: 5308 - RNA, 19 nt, synthetic construct
  source 1..19: mol_type = other RNA
cagataagtgagtaaagct

SEQ ID NO: 5309 - RNA, 19 nt, synthetic construct
  source 1..19: mol_type = other RNA
agataagtgagtaaagctt

SEQ ID NO: 5310 - RNA, 19 nt, synthetic construct
  source 1..19: mol_type = other RNA
gataagtgagtaaagcttt

SEQ ID NO: 5311 - RNA, 19 nt, synthetic construct
  source 1..19: mol_type = other RNA
ataagtgagtaaagctttt

SEQ ID NO: 5312 - RNA, 19 nt, synthetic construct
  source 1..19: mol_type = other RNA
taagtgagtaaagctttta

SEQ ID NO: 5313 - RNA, 19 nt, synthetic construct
  source 1..19: mol_type = other RNA
aagtgagtaaagcttttat

SEQ ID NO: 5314 - RNA, 19 nt, synthetic construct
  source 1..19: mol_type = other RNA
agtgagtaaagcttttatt

SEQ ID NO: 5315 - RNA, 19 nt, synthetic construct
  source 1..19: mol_type = other RNA
gtgagtaaagcttttattt

SEQ ID NO: 5316 - RNA, 19 nt, synthetic construct
  source 1..19: mol_type = other RNA
tgagtaaagcttttatttg

SEQ ID NO: 5317 - RNA, 19 nt, synthetic construct
  source 1..19: mol_type = other RNA
gagtaaagcttttatttgc

SEQ ID NO: 5318 - RNA, 19 nt, synthetic construct
  source 1..19: mol_type = other RNA
agtaaagcttttatttgcc

SEQ ID NO: 5319 - RNA, 19 nt, synthetic construct
  source 1..19: mol_type = other RNA
gtaaagcttttatttgcca

SEQ ID NO: 5320 - RNA, 19 nt, synthetic construct
  source 1..19: mol_type = other RNA
taaagcttttatttgccat

SEQ ID NO: 5321 - RNA, 19 nt, synthetic construct
  source 1..19: mol_type = other RNA
aaagcttttatttgccatt

SEQ ID NO: 5322 - RNA, 19 nt, synthetic construct
  source 1..19: mol_type = other RNA
aagcttttatttgccattt

SEQ ID NO: 5323 - RNA, 19 nt, synthetic construct
  source 1..19: mol_type = other RNA
agcttttatttgccatttg

SEQ ID NO: 5324 - RNA, 19 nt, synthetic construct
  source 1..19: mol_type = other RNA
gcttttatttgccatttgg

SEQ ID NO: 5325 - RNA, 19 nt, synthetic construct
  source 1..19: mol_type = other RNA
cttttatttgccatttgga

SEQ ID NO: 5326 - RNA, 19 nt, synthetic construct
  source 1..19: mol_type = other RNA
ttttatttgccatttggat

SEQ ID NO: 5327 - RNA, 19 nt, synthetic construct
  source 1..19: mol_type = other RNA
tttatttgccatttggatg

SEQ ID NO: 5328 - RNA, 19 nt, synthetic construct
  source 1..19: mol_type = other RNA
ttatttgccatttggatgc

SEQ ID NO: 5329 - RNA, 19 nt, synthetic construct
  source 1..19: mol_type = other RNA
tatttgccatttggatgcc

SEQ ID NO: 5330 - RNA, 19 nt, synthetic construct
  source 1..19: mol_type = other RNA
atttgccatttggatgcct

SEQ ID NO: 5331 - RNA, 19 nt, synthetic construct
  source 1..19: mol_type = other RNA
tttgccatttggatgcctt

SEQ ID NO: 5332 - RNA, 19 nt, synthetic construct
  source 1..19: mol_type = other RNA
ttgccatttggatgccttc

SEQ ID NO: 5333 - RNA, 19 nt, synthetic construct
  source 1..19: mol_type = other RNA
tgccatttggatgccttcg

SEQ ID NO: 5334 - RNA, 19 nt, synthetic construct
  source 1..19: mol_type = other RNA
gccatttggatgccttcgt

SEQ ID NO: 5335 - RNA, 19 nt, synthetic construct
  source 1..19: mol_type = other RNA
ccatttggatgccttcgtt

SEQ ID NO: 5336 - RNA, 19 nt, synthetic construct
  source 1..19: mol_type = other RNA
catttggatgccttcgttc

SEQ ID NO: 5337 - RNA, 19 nt, synthetic construct
  source 1..19: mol_type = other RNA
atttggatgccttcgttca

SEQ ID NO: 5338 - RNA, 19 nt, synthetic construct
  source 1..19: mol_type = other RNA
tttggatgccttcgttcaa

SEQ ID NO: 5339 - RNA, 19 nt, synthetic construct
  source 1..19: mol_type = other RNA
ttggatgccttcgttcaaa

SEQ ID NO: 5340 - RNA, 19 nt, synthetic construct
  source 1..19: mol_type = other RNA
tggatgccttcgttcaaag

SEQ ID NO: 5341 - RNA, 19 nt, synthetic construct
  source 1..19: mol_type = other RNA
ggatgccttcgttcaaagt

SEQ ID NO: 5342 - RNA, 19 nt, synthetic construct
  source 1..19: mol_type = other RNA
gatgccttcgttcaaagtg

SEQ ID NO: 5343 - RNA, 19 nt, synthetic construct
  source 1..19: mol_type = other RNA
atgccttcgttcaaagtga

SEQ ID NO: 5344 - RNA, 19 nt, synthetic construct
  source 1..19: mol_type = other RNA
tgccttcgttcaaagtgat

SEQ ID NO: 5345 - RNA, 19 nt, synthetic construct
  source 1..19: mol_type = other RNA
gccttcgttcaaagtgata

SEQ ID NO: 5346 - RNA, 19 nt, synthetic construct
  source 1..19: mol_type = other RNA
ccttcgttcaaagtgatag

SEQ ID NO: 5347 - RNA, 19 nt, synthetic construct
  source 1..19: mol_type = other RNA
cttcgttcaaagtgataga

SEQ ID NO: 5348 - RNA, 19 nt, synthetic construct
  source 1..19: mol_type = other RNA
ttcgttcaaagtgatagag

SEQ ID NO: 5349 - RNA, 19 nt, synthetic construct
  source 1..19: mol_type = other RNA
tcgttcaaagtgatagagt

SEQ ID NO: 5350 - RNA, 19 nt, synthetic construct
  source 1..19: mol_type = other RNA
cgttcaaagtgatagagtg

SEQ ID NO: 5351 - RNA, 19 nt, synthetic construct
  source 1..19: mol_type = other RNA
gttcaaagtgatagagtgt

SEQ ID NO: 5352 - RNA, 19 nt, synthetic construct
  source 1..19: mol_type = other RNA
ttcaaagtgatagagtgtt

SEQ ID NO: 5353 - RNA, 19 nt, synthetic construct
  source 1..19: mol_type = other RNA
tcaaagtgatagagtgttt

SEQ ID NO: 5354 - RNA, 19 nt, synthetic construct
  source 1..19: mol_type = other RNA
caaagtgatagagtgtttt

SEQ ID NO: 5355 - RNA, 19 nt, synthetic construct
  source 1..19: mol_type = other RNA
aaagtgatagagtgttttg

SEQ ID NO: 5356 - RNA, 19 nt, synthetic construct
  source 1..19: mol_type = other RNA
aagtgatagagtgttttgc

SEQ ID NO: 5357 - RNA, 19 nt, synthetic construct
  source 1..19: mol_type = other RNA
agtgatagagtgttttgct

SEQ ID NO: 5358 - RNA, 19 nt, synthetic construct
  source 1..19: mol_type = other RNA
gtgatagagtgttttgctg

SEQ ID NO: 5359 - RNA, 19 nt, synthetic construct
  source 1..19: mol_type = other RNA
tgatagagtgttttgctga

SEQ ID NO: 5360 - RNA, 19 nt, synthetic construct
  source 1..19: mol_type = other RNA
gatagagtgttttgctgat

SEQ ID NO: 5361 - RNA, 19 nt, synthetic construct
  source 1..19: mol_type = other RNA
atagagtgttttgctgata

SEQ ID NO: 5362 - RNA, 19 nt, synthetic construct
  source 1..19: mol_type = other RNA
tagagtgttttgctgatag

SEQ ID NO: 5363 - RNA, 19 nt, synthetic construct
  source 1..19: mol_type = other RNA
agagtgttttgctgatagt

SEQ ID NO: 5364 - RNA, 19 nt, synthetic construct
  source 1..19: mol_type = other RNA
gagtgttttgctgatagtg

SEQ ID NO: 5365 - RNA, 19 nt, synthetic construct
  source 1..19: mol_type = other RNA
agtgttttgctgatagtgc

SEQ ID NO: 5366 - RNA, 19 nt, synthetic construct
  source 1..19: mol_type = other RNA
gtgttttgctgatagtgct

SEQ ID NO: 5367 - RNA, 19 nt, synthetic construct
  source 1..19: mol_type = other RNA
tgttttgctgatagtgctg

SEQ ID NO: 5368 - RNA, 19 nt, synthetic construct
  source 1..19: mol_type = other RNA
gttttgctgatagtgctgt

SEQ ID NO: 5369 - RNA, 19 nt, synthetic construct
  source 1..19: mol_type = other RNA
ttttgctgatagtgctgta

SEQ ID NO: 5370 - RNA, 19 nt, synthetic construct
  source 1..19: mol_type = other RNA
tttgctgatagtgctgtag

SEQ ID NO: 5371 - RNA, 19 nt, synthetic construct
  source 1..19: mol_type = other RNA
ttgctgatagtgctgtagc

SEQ ID NO: 5372 - RNA, 19 nt, synthetic construct
  source 1..19: mol_type = other RNA
tgctgatagtgctgtagca

SEQ ID NO: 5373 - RNA, 19 nt, synthetic construct
  source 1..19: mol_type = other RNA
gctgatagtgctgtagcag

SEQ ID NO: 5374 - RNA, 19 nt, synthetic construct
  source 1..19: mol_type = other RNA
ctgatagtgctgtagcagc

SEQ ID NO: 5375 - RNA, 19 nt, synthetic construct
  source 1..19: mol_type = other RNA
tgatagtgctgtagcagca

SEQ ID NO: 5376 - RNA, 19 nt, synthetic construct
  source 1..19: mol_type = other RNA
gatagtgctgtagcagcag

SEQ ID NO: 5377 - RNA, 19 nt, synthetic construct
  source 1..19: mol_type = other RNA
atagtgctgtagcagcagt

SEQ ID NO: 5378 - RNA, 19 nt, synthetic construct
  source 1..19: mol_type = other RNA
tagtgctgtagcagcagtt

SEQ ID NO: 5379 - RNA, 19 nt, synthetic construct
  source 1..19: mol_type = other RNA
agtgctgtagcagcagttg

SEQ ID NO: 5380 - RNA, 19 nt, synthetic construct
  source 1..19: mol_type = other RNA
gtgctgtagcagcagttgt

SEQ ID NO: 5381 - RNA, 19 nt, synthetic construct
  source 1..19: mol_type = other RNA
tgctgtagcagcagttgta

SEQ ID NO: 5382 - RNA, 19 nt, synthetic construct
  source 1..19: mol_type = other RNA
gctgtagcagcagttgtaa

SEQ ID NO: 5383 - RNA, 19 nt, synthetic construct
  source 1..19: mol_type = other RNA
ctgtagcagcagttgtaaa

SEQ ID NO: 5384 - RNA, 19 nt, synthetic construct
  source 1..19: mol_type = other RNA
tgtagcagcagttgtaaag

SEQ ID NO: 5385 - RNA, 19 nt, synthetic construct
  source 1..19: mol_type = other RNA
gtagcagcagttgtaaagt

SEQ ID NO: 5386 - RNA, 19 nt, synthetic construct
  source 1..19: mol_type = other RNA
tagcagcagttgtaaagta

SEQ ID NO: 5387 - RNA, 19 nt, synthetic construct
  source 1..19: mol_type = other RNA
agcagcagttgtaaagtag

SEQ ID NO: 5388 - RNA, 19 nt, synthetic construct
  source 1..19: mol_type = other RNA
gcagcagttgtaaagtagc

SEQ ID NO: 5389 - RNA, 19 nt, synthetic construct
  source 1..19: mol_type = other RNA
cagcagttgtaaagtagcc

SEQ ID NO: 5390 - RNA, 19 nt, synthetic construct
  source 1..19: mol_type = other RNA
agcagttgtaaagtagcca

SEQ ID NO: 5391 - RNA, 19 nt, synthetic construct
  source 1..19: mol_type = other RNA
gcagttgtaaagtagccaa

SEQ ID NO: 5392 - RNA, 19 nt, synthetic construct
  source 1..19: mol_type = other RNA
cagttgtaaagtagccaaa

SEQ ID NO: 5393 - RNA, 19 nt, synthetic construct
  source 1..19: mol_type = other RNA
agttgtaaagtagccaaaa

SEQ ID NO: 5394 - RNA, 19 nt, synthetic construct
  source 1..19: mol_type = other RNA
gttgtaaagtagccaaaag

SEQ ID NO: 5395 - RNA, 19 nt, synthetic construct
  source 1..19: mol_type = other RNA
ttgtaaagtagccaaaagc

SEQ ID NO: 5396 - RNA, 19 nt, synthetic construct
  source 1..19: mol_type = other RNA
tgtaaagtagccaaaagcc

SEQ ID NO: 5397 - RNA, 19 nt, synthetic construct
  source 1..19: mol_type = other RNA
gtaaagtagccaaaagcca

SEQ ID NO: 5398 - RNA, 19 nt, synthetic construct
  source 1..19: mol_type = other RNA
taaagtagccaaaagccac

SEQ ID NO: 5399 - RNA, 19 nt, synthetic construct
  source 1..19: mol_type = other RNA
aaagtagccaaaagccacg

SEQ ID NO: 5400 - RNA, 19 nt, synthetic construct
  source 1..19: mol_type = other RNA
aagtagccaaaagccacgt

SEQ ID NO: 5401 - RNA, 19 nt, synthetic construct
  source 1..19: mol_type = other RNA
agtagccaaaagccacgtt

SEQ ID NO: 5402 - RNA, 19 nt, synthetic construct
  source 1..19: mol_type = other RNA
gtagccaaaagccacgttg

SEQ ID NO: 5403 - RNA, 19 nt, synthetic construct
  source 1..19: mol_type = other RNA
tagccaaaagccacgttgt

SEQ ID NO: 5404 - RNA, 19 nt, synthetic construct
  source 1..19: mol_type = other RNA
agccaaaagccacgttgtt

SEQ ID NO: 5405 - RNA, 19 nt, synthetic construct
  source 1..19: mol_type = other RNA
gccaaaagccacgttgttt

SEQ ID NO: 5406 - RNA, 19 nt, synthetic construct
  source 1..19: mol_type = other RNA
ccaaaagccacgttgttta

SEQ ID NO: 5407 - RNA, 19 nt, synthetic construct
  source 1..19: mol_type = other RNA
caaaagccacgttgtttat

SEQ ID NO: 5408 - RNA, 19 nt, synthetic construct
  source 1..19: mol_type = other RNA
aaaagccacgttgtttatt

SEQ ID NO: 5409 - RNA, 19 nt, synthetic construct
  source 1..19: mol_type = other RNA
aaagccacgttgtttattt

SEQ ID NO: 5410 - RNA, 19 nt, synthetic construct
  source 1..19: mol_type = other RNA
aagccacgttgtttattta

SEQ ID NO: 5411 - RNA, 19 nt, synthetic construct
  source 1..19: mol_type = other RNA
agccacgttgtttatttac

SEQ ID NO: 5412 - RNA, 19 nt, synthetic construct
  source 1..19: mol_type = other RNA
gccacgttgtttatttact

SEQ ID NO: 5413 - RNA, 19 nt, synthetic construct
  source 1..19: mol_type = other RNA
ccacgttgtttatttactg

SEQ ID NO: 5414 - RNA, 19 nt, synthetic construct
  source 1..19: mol_type = other RNA
cacgttgtttatttactgg

SEQ ID NO: 5415 - RNA, 19 nt, synthetic construct
  source 1..19: mol_type = other RNA
acgttgtttatttactggt

SEQ ID NO: 5416 - RNA, 19 nt, synthetic construct
  source 1..19: mol_type = other RNA
cgttgtttatttactggtt

SEQ ID NO: 5417 - RNA, 19 nt, synthetic construct
  source 1..19: mol_type = other RNA
gttgtttatttactggttt

SEQ ID NO: 5418 - RNA, 19 nt, synthetic construct
  source 1..19: mol_type = other RNA
ttgtttatttactggtttg

SEQ ID NO: 5419 - RNA, 19 nt, synthetic construct
  source 1..19: mol_type = other RNA
tgtttatttactggtttgt

SEQ ID NO: 5420 - RNA, 19 nt, synthetic construct
  source 1..19: mol_type = other RNA
gtttatttactggtttgtg

SEQ ID NO: 5421 - RNA, 19 nt, synthetic construct
  source 1..19: mol_type = other RNA
tttatttactggtttgtgg

SEQ ID NO: 5422 - RNA, 19 nt, synthetic construct
  source 1..19: mol_type = other RNA
ttatttactggtttgtggc

SEQ ID NO: 5423 - RNA, 19 nt, synthetic construct
  source 1..19: mol_type = other RNA
tatttactggtttgtggcc

SEQ ID NO: 5424 - RNA, 19 nt, synthetic construct
  source 1..19: mol_type = other RNA
atttactggtttgtggcct

SEQ ID NO: 5425 - RNA, 19 nt, synthetic construct
  source 1..19: mol_type = other RNA
tttactggtttgtggcctt

SEQ ID NO: 5426 - RNA, 19 nt, synthetic construct
  source 1..19: mol_type = other RNA
ttactggtttgtggccttt

SEQ ID NO: 5427 - RNA, 19 nt, synthetic construct
  source 1..19: mol_type = other RNA
tactggtttgtggcctttt

SEQ ID NO: 5428 - RNA, 19 nt, synthetic construct
  source 1..19: mol_type = other RNA
actggtttgtggcctttta

SEQ ID NO: 5429 - RNA, 19 nt, synthetic construct
  source 1..19: mol_type = other RNA
ctggtttgtggccttttac

SEQ ID NO: 5430 - RNA, 19 nt, synthetic construct
  source 1..19: mol_type = other RNA
tggtttgtggccttttact

SEQ ID NO: 5431 - RNA, 19 nt, synthetic construct
  source 1..19: mol_type = other RNA
ggtttgtggccttttactg

SEQ ID NO: 5432 - RNA, 19 nt, synthetic construct
  source 1..19: mol_type = other RNA
gtttgtggccttttactgt

SEQ ID NO: 5433 - RNA, 19 nt, synthetic construct
  source 1..19: mol_type = other RNA
tttgtggccttttactgtg

SEQ ID NO: 5434 - RNA, 19 nt, synthetic construct
  source 1..19: mol_type = other RNA
ttgtggccttttactgtgc

SEQ ID NO: 5435 - RNA, 19 nt, synthetic construct
  source 1..19: mol_type = other RNA
tgtggccttttactgtgct

SEQ ID NO: 5436 - RNA, 19 nt, synthetic construct
  source 1..19: mol_type = other RNA
gtggccttttactgtgctt

SEQ ID NO: 5437 - RNA, 19 nt, synthetic construct
  source 1..19: mol_type = other RNA
tggccttttactgtgcttt

SEQ ID NO: 5438 - RNA, 19 nt, synthetic construct
  source 1..19: mol_type = other RNA
ggccttttactgtgctttg

SEQ ID NO: 5439 - RNA, 19 nt, synthetic construct
  source 1..19: mol_type = other RNA
gccttttactgtgctttgt

SEQ ID NO: 5440 - RNA, 19 nt, synthetic construct
  source 1..19: mol_type = other RNA
ccttttactgtgctttgta

SEQ ID NO: 5441 - RNA, 19 nt, synthetic construct
  source 1..19: mol_type = other RNA
cttttactgtgctttgtat

SEQ ID NO: 5442 - RNA, 19 nt, synthetic construct
  source 1..19: mol_type = other RNA
ttttactgtgctttgtatc

SEQ ID NO: 5443 - RNA, 19 nt, synthetic construct
  source 1..19: mol_type = other RNA
tttactgtgctttgtatca

SEQ ID NO: 5444 - RNA, 19 nt, synthetic construct
  source 1..19: mol_type = other RNA
ttactgtgctttgtatcag

SEQ ID NO: 5445 - RNA, 19 nt, synthetic construct
  source 1..19: mol_type = other RNA
tactgtgctttgtatcaga

SEQ ID NO: 5446 - RNA, 19 nt, synthetic construct
  source 1..19: mol_type = other RNA
actgtgctttgtatcagag

SEQ ID NO: 5447 - RNA, 19 nt, synthetic construct
  source 1..19: mol_type = other RNA
ctgtgctttgtatcagagt

SEQ ID NO: 5448 - RNA, 19 nt, synthetic construct
  source 1..19: mol_type = other RNA
tgtgctttgtatcagagtt

SEQ ID NO: 5449 - RNA, 19 nt, synthetic construct
  source 1..19: mol_type = other RNA
gtgctttgtatcagagttc

SEQ ID NO: 5450 - RNA, 19 nt, synthetic construct
  source 1..19: mol_type = other RNA
tgctttgtatcagagttct

SEQ ID NO: 5451 - RNA, 19 nt, synthetic construct
  source 1..19: mol_type = other RNA
gctttgtatcagagttctt

SEQ ID NO: 5452 - RNA, 19 nt, synthetic construct
  source 1..19: mol_type = other RNA
ctttgtatcagagttctta

SEQ ID NO: 5453 - RNA, 19 nt, synthetic construct
  source 1..19: mol_type = other RNA
tttgtatcagagttcttaa

SEQ ID NO: 5454 - RNA, 19 nt, synthetic construct
  source 1..19: mol_type = other RNA
ttgtatcagagttcttaac

SEQ ID NO: 5455 - RNA, 19 nt, synthetic construct
  source 1..19: mol_type = other RNA
tgtatcagagttcttaaca

SEQ ID NO: 5456 - RNA, 19 nt, synthetic construct
  source 1..19: mol_type = other RNA
gtatcagagttcttaacaa

SEQ ID NO: 5457 - RNA, 19 nt, synthetic construct
  source 1..19: mol_type = other RNA
tatcagagttcttaacaag

SEQ ID NO: 5458 - RNA, 19 nt, synthetic construct
  source 1..19: mol_type = other RNA
atcagagttcttaacaaga

SEQ ID NO: 5459 - RNA, 19 nt, synthetic construct
  source 1..19: mol_type = other RNA
tcagagttcttaacaagat

SEQ ID NO: 5460 - RNA, 19 nt, synthetic construct
  source 1..19: mol_type = other RNA
cagagttcttaacaagatt

SEQ ID NO: 5461 - RNA, 19 nt, synthetic construct
  source 1..19: mol_type = other RNA
agagttcttaacaagatta

SEQ ID NO: 5462 - RNA, 19 nt, synthetic construct
  source 1..19: mol_type = other RNA
gagttcttaacaagattaa

SEQ ID NO: 5463 - RNA, 19 nt, synthetic construct
  source 1..19: mol_type = other RNA
agttcttaacaagattaat

SEQ ID NO: 5464 - RNA, 19 nt, synthetic construct
  source 1..19: mol_type = other RNA
gttcttaacaagattaata

SEQ ID NO: 5465 - RNA, 19 nt, synthetic construct
  source 1..19: mol_type = other RNA
ttcttaacaagattaataa

SEQ ID NO: 5466 - RNA, 19 nt, synthetic construct
  source 1..19: mol_type = other RNA
tcttaacaagattaataaa

SEQ ID NO: 5467 - RNA, 19 nt, synthetic construct
  source 1..19: mol_type = other RNA
cttaacaagattaataaat

SEQ ID NO: 5468 - RNA, 19 nt, synthetic construct
  source 1..19: mol_type = other RNA
ttaacaagattaataaatc

SEQ ID NO: 5469 - RNA, 19 nt, synthetic construct
  source 1..19: mol_type = other RNA
taacaagattaataaatca

SEQ ID NO: 5470 - RNA, 19 nt, synthetic construct
  source 1..19: mol_type = other RNA
aacaagattaataaatcac

SEQ ID NO: 5471 - RNA, 19 nt, synthetic construct
  source 1..19: mol_type = other RNA
acaagattaataaatcacc

SEQ ID NO: 5472 - RNA, 19 nt, synthetic construct
  source 1..19: mol_type = other RNA
caagattaataaatcaccc

SEQ ID NO: 5473 - RNA, 19 nt, synthetic construct
  source 1..19: mol_type = other RNA
aagattaataaatcacccc

SEQ ID NO: 5474 - RNA, 19 nt, synthetic construct
  source 1..19: mol_type = other RNA
agattaataaatcacccca

SEQ ID NO: 5475 - RNA, 19 nt, synthetic construct
  source 1..19: mol_type = other RNA
gattaataaatcaccccag

SEQ ID NO: 5476 - RNA, 19 nt, synthetic construct
  source 1..19: mol_type = other RNA
attaataaatcaccccagt

SEQ ID NO: 5477 - RNA, 19 nt, synthetic construct
  source 1..19: mol_type = other RNA
ttaataaatcaccccagtc

SEQ ID NO: 5478 - RNA, 19 nt, synthetic construct
  source 1..19: mol_type = other RNA
taataaatcaccccagtct

SEQ ID NO: 5479 - RNA, 19 nt, synthetic construct
  source 1..19: mol_type = other RNA
aataaatcaccccagtctt

SEQ ID NO: 5480 - RNA, 19 nt, synthetic construct
  source 1..19: mol_type = other RNA
ataaatcaccccagtctta

SEQ ID NO: 5481 - RNA, 19 nt, synthetic construct
  source 1..19: mol_type = other RNA
taaatcaccccagtcttaa

SEQ ID NO: 5482 - RNA, 19 nt, synthetic construct
  source 1..19: mol_type = other RNA
aaatcaccccagtcttaat

SEQ ID NO: 5483 - RNA, 19 nt, synthetic construct
  source 1..19: mol_type = other RNA
aatcaccccagtcttaatt

SEQ ID NO: 5484 - RNA, 19 nt, synthetic construct
  source 1..19: mol_type = other RNA
atcaccccagtcttaattt

SEQ ID NO: 5485 - RNA, 19 nt, synthetic construct
  source 1..19: mol_type = other RNA
tcaccccagtcttaatttt

SEQ ID NO: 5486 - RNA, 19 nt, synthetic construct
  source 1..19: mol_type = other RNA
caccccagtcttaattttt

SEQ ID NO: 5487 - RNA, 19 nt, synthetic construct
  source 1..19: mol_type = other RNA
accccagtcttaattttta

SEQ ID NO: 5488 - RNA, 19 nt, synthetic construct
  source 1..19: mol_type = other RNA
ccccagtcttaatttttaa

SEQ ID NO: 5489 - RNA, 19 nt, synthetic construct
  source 1..19: mol_type = other RNA
cccagtcttaatttttaaa

SEQ ID NO: 5490 - RNA, 19 nt, synthetic construct
  source 1..19: mol_type = other RNA
ccagtcttaatttttaaaa

SEQ ID NO: 5491 - RNA, 19 nt, synthetic construct
  source 1..19: mol_type = other RNA
gcggcgctggcccgcttct

SEQ ID NO: 5492 - RNA, 19 nt, synthetic construct
  source 1..19: mol_type = other RNA
ggcggcgctggcccgcttc

SEQ ID NO: 5493 - RNA, 19 nt, synthetic construct
  source 1..19: mol_type = other RNA
cggcggcgctggcccgctt

SEQ ID NO: 5494 - RNA, 19 nt, synthetic construct
  source 1..19: mol_type = other RNA
ccggcggcgctggcccgct

SEQ ID NO: 5495 - RNA, 19 nt, synthetic construct
  source 1..19: mol_type = other RNA
cccggcggcgctggcccgc

SEQ ID NO: 5496 - RNA, 19 nt, synthetic construct
  source 1..19: mol_type = other RNA
tcccggcggcgctggcccg

SEQ ID NO: 5497 - RNA, 19 nt, synthetic construct
  source 1..19: mol_type = other RNA
ttcccggcggcgctggccc

SEQ ID NO: 5498 - RNA, 19 nt, synthetic construct
  source 1..19: mol_type = other RNA
tttcccggcggcgctggcc

SEQ ID NO: 5499 - RNA, 19 nt, synthetic construct
  source 1..19: mol_type = other RNA
ctttcccggcggcgctggc

SEQ ID NO: 5500 - RNA, 19 nt, synthetic construct
  source 1..19: mol_type = other RNA
cctttcccggcggcgctgg

SEQ ID NO: 5501 - RNA, 19 nt, synthetic construct
  source 1..19: mol_type = other RNA
tcctttcccggcggcgctg

SEQ ID NO: 5502 - RNA, 19 nt, synthetic construct
  source 1..19: mol_type = other RNA
ctcctttcccggcggcgct

SEQ ID NO: 5503 - RNA, 19 nt, synthetic construct
  source 1..19: mol_type = other RNA
cctcctttcccggcggcgc

SEQ ID NO: 5504 - RNA, 19 nt, synthetic construct
  source 1..19: mol_type = other RNA
acctcctttcccggcggcg

SEQ ID NO: 5505 - RNA, 19 nt, synthetic construct
  source 1..19: mol_type = other RNA
gacctcctttcccggcggc

SEQ ID NO: 5506 - RNA, 19 nt, synthetic construct
  source 1..19: mol_type = other RNA
cgacctcctttcccggcgg

SEQ ID NO: 5507 - RNA, 19 nt, synthetic construct
  source 1..19: mol_type = other RNA
gcgacctcctttcccggcg

SEQ ID NO: 5508 - RNA, 19 nt, synthetic construct
  source 1..19: mol_type = other RNA
ggcgacctcctttcccggc

SEQ ID NO: 5509 - RNA, 19 nt, synthetic construct
  source 1..19: mol_type = other RNA
cggcgacctcctttcccgg

SEQ ID NO: 5510 - RNA, 19 nt, synthetic construct
  source 1..19: mol_type = other RNA
gcggcgacctcctttcccg

SEQ ID NO: 5511 - RNA, 19 nt, synthetic construct
  source 1..19: mol_type = other RNA
ggcggcgacctcctttccc

SEQ ID NO: 5512 - RNA, 19 nt, synthetic construct
  source 1..19: mol_type = other RNA
gggcggcgacctcctttcc

SEQ ID NO: 5513 - RNA, 19 nt, synthetic construct
  source 1..19: mol_type = other RNA
cgggcggcgacctcctttc

SEQ ID NO: 5514 - RNA, 19 nt, synthetic construct
  source 1..19: mol_type = other RNA
ccgggcggcgacctccttt

SEQ ID NO: 5515 - RNA, 19 nt, synthetic construct
  source 1..19: mol_type = other RNA
cccgggcggcgacctcctt

SEQ ID NO: 5516 - RNA, 19 nt, synthetic construct
  source 1..19: mol_type = other RNA
ccccgggcggcgacctcct

SEQ ID NO: 5517 - RNA, 19 nt, synthetic construct
  source 1..19: mol_type = other RNA
accccgggcggcgacctcc

SEQ ID NO: 5518 - RNA, 19 nt, synthetic construct
  source 1..19: mol_type = other RNA
gaccccgggcggcgacctc

SEQ ID NO: 5519 - RNA, 19 nt, synthetic construct
  source 1..19: mol_type = other RNA
cgaccccgggcggcgacct

SEQ ID NO: 5520 - RNA, 19 nt, synthetic construct
  source 1..19: mol_type = other RNA
gcgaccccgggcggcgacc

SEQ ID NO: 5521 - RNA, 19 nt, synthetic construct
  source 1..19: mol_type = other RNA
ggcgaccccgggcggcgac

SEQ ID NO: 5522 - RNA, 19 nt, synthetic construct
  source 1..19: mol_type = other RNA
gggcgaccccgggcggcga

SEQ ID NO: 5523 - RNA, 19 nt, synthetic construct
  source 1..19: mol_type = other RNA
cgggcgaccccgggcggcg

SEQ ID NO: 5524 - RNA, 19 nt, synthetic construct
  source 1..19: mol_type = other RNA
ccgggcgaccccgggcggc

SEQ ID NO: 5525 - RNA, 19 nt, synthetic construct
  source 1..19: mol_type = other RNA
cccgggcgaccccgggcgg

SEQ ID NO: 5526 - RNA, 19 nt, synthetic construct
  source 1..19: mol_type = other RNA
gcccgggcgaccccgggcg

SEQ ID NO: 5527 - RNA, 19 nt, synthetic construct
  source 1..19: mol_type = other RNA
agcccgggcgaccccgggc

SEQ ID NO: 5528 - RNA, 19 nt, synthetic construct
  source 1..19: mol_type = other RNA
aagcccgggcgaccccggg

SEQ ID NO: 5529 - RNA, 19 nt, synthetic construct
  source 1..19: mol_type = other RNA
caagcccgggcgaccccgg

SEQ ID NO: 5530 - RNA, 19 nt, synthetic construct
  source 1..19: mol_type = other RNA
gcaagcccgggcgaccccg

SEQ ID NO: 5531 - RNA, 19 nt, synthetic construct
  source 1..19: mol_type = other RNA
cgcaagcccgggcgacccc

SEQ ID NO: 5532 - RNA, 19 nt, synthetic construct
  source 1..19: mol_type = other RNA
ccgcaagcccgggcgaccc

SEQ ID NO: 5533 - RNA, 19 nt, synthetic construct
  source 1..19: mol_type = other RNA
cccgcaagcccgggcgacc

SEQ ID NO: 5534 - RNA, 19 nt, synthetic construct
  source 1..19: mol_type = other RNA
acccgcaagcccgggcgac

SEQ ID NO: 5535 - RNA, 19 nt, synthetic construct
  source 1..19: mol_type = other RNA
gacccgcaagcccgggcga

SEQ ID NO: 5536 - RNA, 19 nt, synthetic construct
  source 1..19: mol_type = other RNA
cgacccgcaagcccgggcg

SEQ ID NO: 5537 - RNA, 19 nt, synthetic construct
  source 1..19: mol_type = other RNA
gcgacccgcaagcccgggc

SEQ ID NO: 5538 - RNA, 19 nt, synthetic construct
  source 1..19: mol_type = other RNA
ggcgacccgcaagcccggg

SEQ ID NO: 5539 - RNA, 19 nt, synthetic construct
  source 1..19: mol_type = other RNA
cggcgacccgcaagcccgg

SEQ ID NO: 5540 - RNA, 19 nt, synthetic construct
  source 1..19: mol_type = other RNA
gcggcgacccgcaagcccg

SEQ ID NO: 5541 - RNA, 19 nt, synthetic construct
  source 1..19: mol_type = other RNA
cgcggcgacccgcaagccc

SEQ ID NO: 5542 - RNA, 19 nt, synthetic construct
  source 1..19: mol_type = other RNA
gcgcggcgacccgcaagcc

SEQ ID NO: 5543 - RNA, 19 nt, synthetic construct
  source 1..19: mol_type = other RNA
agcgcggcgacccgcaagc

SEQ ID NO: 5544 - RNA, 19 nt, synthetic construct
  source 1..19: mol_type = other RNA
aagcgcggcgacccgcaag

SEQ ID NO: 5545 - RNA, 19 nt, synthetic construct
  source 1..19: mol_type = other RNA
gaagcgcggcgacccgcaa

SEQ ID NO: 5546 - RNA, 19 nt, synthetic construct
  source 1..19: mol_type = other RNA
ggaagcgcggcgacccgca

SEQ ID NO: 5547 - RNA, 19 nt, synthetic construct
  source 1..19: mol_type = other RNA
aggaagcgcggcgacccgc

SEQ ID NO: 5548 - RNA, 19 nt, synthetic construct
  source 1..19: mol_type = other RNA
gaggaagcgcggcgacccg

SEQ ID NO: 5549 - RNA, 19 nt, synthetic construct
  source 1..19: mol_type = other RNA
agaggaagcgcggcgaccc

SEQ ID NO: 5550 - RNA, 19 nt, synthetic construct
  source 1..19: mol_type = other RNA
cagaggaagcgcggcgacc

SEQ ID NO: 5551 - RNA, 19 nt, synthetic construct
  source 1..19: mol_type = other RNA
gcagaggaagcgcggcgac

SEQ ID NO: 5552 - RNA, 19 nt, synthetic construct
  source 1..19: mol_type = other RNA
cgcagaggaagcgcggcga

SEQ ID NO: 5553 - RNA, 19 nt, synthetic construct
  source 1..19: mol_type = other RNA
ccgcagaggaagcgcggcg

SEQ ID NO: 5554 - RNA, 19 nt, synthetic construct
  source 1..19: mol_type = other RNA
cccgcagaggaagcgcggc

SEQ ID NO: 5555 - RNA, 19 nt, synthetic construct
  source 1..19: mol_type = other RNA
gcccgcagaggaagcgcgg

SEQ ID NO: 5556 - RNA, 19 nt, synthetic construct
  source 1..19: mol_type = other RNA
cgcccgcagaggaagcgcg

SEQ ID NO: 5557 - RNA, 19 nt, synthetic construct
  source 1..19: mol_type = other RNA
gcgcccgcagaggaagcgc

SEQ ID NO: 5558 - RNA, 19 nt, synthetic construct
  source 1..19: mol_type = other RNA
agcgcccgcagaggaagcg

SEQ ID NO: 5559 - RNA, 19 nt, synthetic construct
  source 1..19: mol_type = other RNA
cagcgcccgcagaggaagc

SEQ ID NO: 5560 - RNA, 19 nt, synthetic construct
  source 1..19: mol_type = other RNA
gcagcgcccgcagaggaag

SEQ ID NO: 5561 - RNA, 19 nt, synthetic construct
  source 1..19: mol_type = other RNA
cgcagcgcccgcagaggaa

SEQ ID NO: 5562 - RNA, 19 nt, synthetic construct
  source 1..19: mol_type = other RNA
ccgcagcgcccgcagagga

SEQ ID NO: 5563 - RNA, 19 nt, synthetic construct
  source 1..19: mol_type = other RNA
cccgcagcgcccgcagagg

SEQ ID NO: 5564 - RNA, 19 nt, synthetic construct
  source 1..19: mol_type = other RNA
tcccgcagcgcccgcagag

SEQ ID NO: 5565 - RNA, 19 nt, synthetic construct
  source 1..19: mol_type = other RNA
ctcccgcagcgcccgcaga

SEQ ID NO: 5566 - RNA, 19 nt, synthetic construct
  source 1..19: mol_type = other RNA
cctcccgcagcgcccgcag

SEQ ID NO: 5567 - RNA, 19 nt, synthetic construct
  source 1..19: mol_type = other RNA
gcctcccgcagcgcccgca

SEQ ID NO: 5568 - RNA, 19 nt, synthetic construct
  source 1..19: mol_type = other RNA
cgcctcccgcagcgcccgc

SEQ ID NO: 5569 - RNA, 19 nt, synthetic construct
  source 1..19: mol_type = other RNA
tcgcctcccgcagcgcccg

SEQ ID NO: 5570 - RNA, 19 nt, synthetic construct
  source 1..19: mol_type = other RNA
ctcgcctcccgcagcgccc

SEQ ID NO: 5571 - RNA, 19 nt, synthetic construct
  source 1..19: mol_type = other RNA
cctcgcctcccgcagcgcc

SEQ ID NO: 5572 - RNA, 19 nt, synthetic construct
  source 1..19: mol_type = other RNA
ccctcgcctcccgcagcgc

SEQ ID NO: 5573 - RNA, 19 nt, synthetic construct
  source 1..19: mol_type = other RNA
gccctcgcctcccgcagcg

SEQ ID NO: 5574 - RNA, 19 nt, synthetic construct
  source 1..19: mol_type = other RNA
ggccctcgcctcccgcagc

SEQ ID NO: 5575 - RNA, 19 nt, synthetic construct
  source 1..19: mol_type = other RNA
cggccctcgcctcccgcag

SEQ ID NO: 5576 - RNA, 19 nt, synthetic construct
  source 1..19: mol_type = other RNA
gcggccctcgcctcccgca

SEQ ID NO: 5577 - RNA, 19 nt, synthetic construct
  source 1..19: mol_type = other RNA
ggcggccctcgcctcccgc

SEQ ID NO: 5578 - RNA, 19 nt, synthetic construct
  source 1..19: mol_type = other RNA
aggcggccctcgcctcccg

SEQ ID NO: 5579 - RNA, 19 nt, synthetic construct
  source 1..19: mol_type = other RNA
gaggcggccctcgcctccc

SEQ ID NO: 5580 - RNA, 19 nt, synthetic construct
  source 1..19: mol_type = other RNA
cgaggcggccctcgcctcc

SEQ ID NO: 5581 - RNA, 19 nt, synthetic construct
  source 1..19: mol_type = other RNA
ccgaggcggccctcgcctc

SEQ ID NO: 5582 - RNA, 19 nt, synthetic construct
  source 1..19: mol_type = other RNA
gccgaggcggccctcgcct

SEQ ID NO: 5583 - RNA, 19 nt, synthetic construct
  source 1..19: mol_type = other RNA
cgccgaggcggccctcgcc

SEQ ID NO: 5584 - RNA, 19 nt, synthetic construct
  source 1..19: mol_type = other RNA
ccgccgaggcggccctcgc

SEQ ID NO: 5585 - RNA, 19 nt, synthetic construct
  source 1..19: mol_type = other RNA
tccgccgaggcggccctcg

SEQ ID NO: 5586 - RNA, 19 nt, synthetic construct
  source 1..19: mol_type = other RNA
ctccgccgaggcggccctc

SEQ ID NO: 5587 - RNA, 19 nt, synthetic construct
  source 1..19: mol_type = other RNA
cctccgccgaggcggccct

SEQ ID NO: 5588 - RNA, 19 nt, synthetic construct
  source 1..19: mol_type = other RNA
tcctccgccgaggcggccc

SEQ ID NO: 5589 - RNA, 19 nt, synthetic construct
  source 1..19: mol_type = other RNA
ttcctccgccgaggcggcc

SEQ ID NO: 5590 - RNA, 19 nt, synthetic construct
  source 1..19: mol_type = other RNA
cttcctccgccgaggcggc

SEQ ID NO: 5591 - RNA, 19 nt, synthetic construct
  source 1..19: mol_type = other RNA
gcttcctccgccgaggcgg

SEQ ID NO: 5592 - RNA, 19 nt, synthetic construct
  source 1..19: mol_type = other RNA
ggcttcctccgccgaggcg

SEQ ID NO: 5593 - RNA, 19 nt, synthetic construct
  source 1..19: mol_type = other RNA
cggcttcctccgccgaggc

SEQ ID NO: 5594 - RNA, 19 nt, synthetic construct
  source 1..19: mol_type = other RNA
tcggcttcctccgccgagg

SEQ ID NO: 5595 - RNA, 19 nt, synthetic construct
  source 1..19: mol_type = other RNA
gtcggcttcctccgccgag

SEQ ID NO: 5596 - RNA, 19 nt, synthetic construct
  source 1..19: mol_type = other RNA
ggtcggcttcctccgccga

SEQ ID NO: 5597 - RNA, 19 nt, synthetic construct
  source 1..19: mol_type = other RNA
gggtcggcttcctccgccg

SEQ ID NO: 5598 - RNA, 19 nt, synthetic construct
  source 1..19: mol_type = other RNA
ggggtcggcttcctccgcc

SEQ ID NO: 5599 - RNA, 19 nt, synthetic construct
  source 1..19: mol_type = other RNA
cggggtcggcttcctccgc

SEQ ID NO: 5600 - RNA, 19 nt, synthetic construct
  source 1..19: mol_type = other RNA
ccggggtcggcttcctccg

SEQ ID NO: 5601 - RNA, 19 nt, synthetic construct
  source 1..19: mol_type = other RNA
cccggggtcggcttcctcc

SEQ ID NO: 5602 - RNA, 19 nt, synthetic construct
  source 1..19: mol_type = other RNA
ccccggggtcggcttcctc

SEQ ID NO: 5603 - RNA, 19 nt, synthetic construct
  source 1..19: mol_type = other RNA
accccggggtcggcttcct

SEQ ID NO: 5604 - RNA, 19 nt, synthetic construct
  source 1..19: mol_type = other RNA
gaccccggggtcggcttcc

SEQ ID NO: 5605 - RNA, 19 nt, synthetic construct
  source 1..19: mol_type = other RNA
agaccccggggtcggcttc

SEQ ID NO: 5606 - RNA, 19 nt, synthetic construct
  source 1..19: mol_type = other RNA
gagaccccggggtcggctt

SEQ ID NO: 5607 - RNA, 19 nt, synthetic construct
  source 1..19: mol_type = other RNA
ggagaccccggggtcggct

SEQ ID NO: 5608 - RNA, 19 nt, synthetic construct
  source 1..19: mol_type = other RNA
cggagaccccggggtcggc

SEQ ID NO: 5609 - RNA, 19 nt, synthetic construct
  source 1..19: mol_type = other RNA
gcggagaccccggggtcgg

SEQ ID NO: 5610 - RNA, 19 nt, synthetic construct
  source 1..19: mol_type = other RNA
ggcggagaccccggggtcg

SEQ ID NO: 5611 - RNA, 19 nt, synthetic construct
  source 1..19: mol_type = other RNA
tggcggagaccccggggtc

SEQ ID NO: 5612 - RNA, 19 nt, synthetic construct
  source 1..19: mol_type = other RNA
ctggcggagaccccggggt

SEQ ID NO: 5613 - RNA, 19 nt, synthetic construct
  source 1..19: mol_type = other RNA
gctggcggagaccccgggg

SEQ ID NO: 5614 - RNA, 19 nt, synthetic construct
  source 1..19: mol_type = other RNA
ggctggcggagaccccggg

SEQ ID NO: 5615 - RNA, 19 nt, synthetic construct
  source 1..19: mol_type = other RNA
gggctggcggagaccccgg

SEQ ID NO: 5616 - RNA, 19 nt, synthetic construct
  source 1..19: mol_type = other RNA
cgggctggcggagaccccg

SEQ ID NO: 5617 - RNA, 19 nt, synthetic construct
  source 1..19: mol_type = other RNA
gcgggctggcggagacccc

SEQ ID NO: 5618 - RNA, 19 nt, synthetic construct
  source 1..19: mol_type = other RNA
ggcgggctggcggagaccc

SEQ ID NO: 5619 - RNA, 19 nt, synthetic construct
  source 1..19: mol_type = other RNA
cggcgggctggcggagacc

SEQ ID NO: 5620 - RNA, 19 nt, synthetic construct
  source 1..19: mol_type = other RNA
ccggcgggctggcggagac

SEQ ID NO: 5621 - RNA, 19 nt, synthetic construct
  source 1..19: mol_type = other RNA
gccggcgggctggcggaga

SEQ ID NO: 5622 - RNA, 19 nt, synthetic construct
  source 1..19: mol_type = other RNA
cgccggcgggctggcggag

SEQ ID NO: 5623 - RNA, 19 nt, synthetic construct
  source 1..19: mol_type = other RNA
gcgccggcgggctggcgga

SEQ ID NO: 5624 - RNA, 19 nt, synthetic construct
  source 1..19: mol_type = other RNA
ggcgccggcgggctggcgg

SEQ ID NO: 5625 - RNA, 19 nt, synthetic construct
  source 1..19: mol_type = other RNA
cggcgccggcgggctggcg

SEQ ID NO: 5626 - RNA, 19 nt, synthetic construct
  source 1..19: mol_type = other RNA
gcggcgccggcgggctggc

SEQ ID NO: 5627 - RNA, 19 nt, synthetic construct
  source 1..19: mol_type = other RNA
ggcggcgccggcgggctgg

SEQ ID NO: 5628 - RNA, 19 nt, synthetic construct
  source 1..19: mol_type = other RNA
aggcggcgccggcgggctg

SEQ ID NO: 5629 - RNA, 19 nt, synthetic construct
  source 1..19: mol_type = other RNA
gaggcggcgccggcgggct

SEQ ID NO: 5630 - RNA, 19 nt, synthetic construct
  source 1..19: mol_type = other RNA
ggaggcggcgccggcgggc

SEQ ID NO: 5631 - RNA, 19 nt, synthetic construct
  source 1..19: mol_type = other RNA
cggaggcggcgccggcggg

SEQ ID NO: 5632 - RNA, 19 nt, synthetic construct
  source 1..19: mol_type = other RNA
tcggaggcggcgccggcgg

SEQ ID NO: 5633 - RNA, 19 nt, synthetic construct
  source 1..19: mol_type = other RNA
ctcggaggcggcgccggcg

SEQ ID NO: 5634 - RNA, 19 nt, synthetic construct
  source 1..19: mol_type = other RNA
gctcggaggcggcgccggc

SEQ ID NO: 5635 - RNA, 19 nt, synthetic construct
  source 1..19: mol_type = other RNA
ggctcggaggcggcgccgg

SEQ ID NO: 5636 - RNA, 19 nt, synthetic construct
  source 1..19: mol_type = other RNA
cggctcggaggcggcgccg

SEQ ID NO: 5637 - RNA, 19 nt, synthetic construct
  source 1..19: mol_type = other RNA
gcggctcggaggcggcgcc

SEQ ID NO: 5638 - RNA, 19 nt, synthetic construct
  source 1..19: mol_type = other RNA
ggcggctcggaggcggcgc

SEQ ID NO: 5639 - RNA, 19 nt, synthetic construct
  source 1..19: mol_type = other RNA
aggcggctcggaggcggcg

SEQ ID NO: 5640 - RNA, 19 nt, synthetic construct
  source 1..19: mol_type = other RNA
gaggcggctcggaggcggc

SEQ ID NO: 5641 - RNA, 19 nt, synthetic construct
  source 1..19: mol_type = other RNA
cgaggcggctcggaggcgg

SEQ ID NO: 5642 - RNA, 19 nt, synthetic construct
  source 1..19: mol_type = other RNA
ccgaggcggctcggaggcg

SEQ ID NO: 5643 - RNA, 19 nt, synthetic construct
  source 1..19: mol_type = other RNA
gccgaggcggctcggaggc

SEQ ID NO: 5644 - RNA, 19 nt, synthetic construct
  source 1..19: mol_type = other RNA
ggccgaggcggctcggagg

SEQ ID NO: 5645 - RNA, 19 nt, synthetic construct
  source 1..19: mol_type = other RNA
cggccgaggcggctcggag

SEQ ID NO: 5646 - RNA, 19 nt, synthetic construct
  source 1..19: mol_type = other RNA
acggccgaggcggctcgga

SEQ ID NO: 5647 - RNA, 19 nt, synthetic construct
  source 1..19: mol_type = other RNA
tacggccgaggcggctcgg

SEQ ID NO: 5648 - RNA, 19 nt, synthetic construct
  source 1..19: mol_type = other RNA
ctacggccgaggcggctcg

SEQ ID NO: 5649 - RNA, 19 nt, synthetic construct
  source 1..19: mol_type = other RNA
gctacggccgaggcggctc

SEQ ID NO: 5650 - RNA, 19 nt, synthetic construct
  source 1..19: mol_type = other RNA
ggctacggccgaggcggct

SEQ ID NO: 5651 - RNA, 19 nt, synthetic construct
  source 1..19: mol_type = other RNA
aggctacggccgaggcggc

SEQ ID NO: 5652 - RNA, 19 nt, synthetic construct
  source 1..19: mol_type = other RNA
gaggctacggccgaggcgg

SEQ ID NO: 5653 - RNA, 19 nt, synthetic construct
  source 1..19: mol_type = other RNA
cgaggctacggccgaggcg

SEQ ID NO: 5654 - RNA, 19 nt, synthetic construct
  source 1..19: mol_type = other RNA
ccgaggctacggccgaggc

SEQ ID NO: 5655 - RNA, 19 nt, synthetic construct
  source 1..19: mol_type = other RNA
gccgaggctacggccgagg

SEQ ID NO: 5656 - RNA, 19 nt, synthetic construct
  source 1..19: mol_type = other RNA
ggccgaggctacggccgag

SEQ ID NO: 5657 - RNA, 19 nt, synthetic construct
  source 1..19: mol_type = other RNA
gggccgaggctacggccga

SEQ ID NO: 5658 - RNA, 19 nt, synthetic construct
  source 1..19: mol_type = other RNA
cgggccgaggctacggccg

SEQ ID NO: 5659 - RNA, 19 nt, synthetic construct
  source 1..19: mol_type = other RNA
ccgggccgaggctacggcc

SEQ ID NO: 5660 - RNA, 19 nt, synthetic construct
  source 1..19: mol_type = other RNA
cccgggccgaggctacggc

SEQ ID NO: 5661 - RNA, 19 nt, synthetic construct
  source 1..19: mol_type = other RNA
gcccgggccgaggctacgg

SEQ ID NO: 5662 - RNA, 19 nt, synthetic construct
  source 1..19: mol_type = other RNA
cgcccgggccgaggctacg

SEQ ID NO: 5663 - RNA, 19 nt, synthetic construct
  source 1..19: mol_type = other RNA
ccgcccgggccgaggctac

SEQ ID NO: 5664 - RNA, 19 nt, synthetic construct
  source 1..19: mol_type = other RNA
cccgcccgggccgaggcta

SEQ ID NO: 5665 - RNA, 19 nt, synthetic construct
  source 1..19: mol_type = other RNA
tcccgcccgggccgaggct

SEQ ID NO: 5666 - RNA, 19 nt, synthetic construct
  source 1..19: mol_type = other RNA
ctcccgcccgggccgaggc

SEQ ID NO: 5667 - RNA, 19 nt, synthetic construct
  source 1..19: mol_type = other RNA
cctcccgcccgggccgagg

SEQ ID NO: 5668 - RNA, 19 nt, synthetic construct
  source 1..19: mol_type = other RNA
gcctcccgcccgggccgag

SEQ ID NO: 5669 - RNA, 19 nt, synthetic construct
  source 1..19: mol_type = other RNA
cgcctcccgcccgggccga

SEQ ID NO: 5670 - RNA, 19 nt, synthetic construct
  source 1..19: mol_type = other RNA
ccgcctcccgcccgggccg

SEQ ID NO: 5671 - RNA, 19 nt, synthetic construct
  source 1..19: mol_type = other RNA
gccgcctcccgcccgggcc

SEQ ID NO: 5672 - RNA, 19 nt, synthetic construct
  source 1..19: mol_type = other RNA
cgccgcctcccgcccgggc

SEQ ID NO: 5673 - RNA, 19 nt, synthetic construct
  source 1..19: mol_type = other RNA
ccgccgcctcccgcccggg

SEQ ID NO: 5674 - RNA, 19 nt, synthetic construct
  source 1..19: mol_type = other RNA
gccgccgcctcccgcccgg

SEQ ID NO: 5675 - RNA, 19 nt, synthetic construct
  source 1..19: mol_type = other RNA
ggccgccgcctcccgcccg

SEQ ID NO: 5676 - RNA, 19 nt, synthetic construct
  source 1..19: mol_type = other RNA
cggccgccgcctcccgccc

SEQ ID NO: 5677 - RNA, 19 nt, synthetic construct
  source 1..19: mol_type = other RNA
gcggccgccgcctcccgcc

SEQ ID NO: 5678 - RNA, 19 nt, synthetic construct
  source 1..19: mol_type = other RNA
ggcggccgccgcctcccgc

SEQ ID NO: 5679 - RNA, 19 nt, synthetic construct
  source 1..19: mol_type = other RNA
cggcggccgccgcctcccg

SEQ ID NO: 5680 - RNA, 19 nt, synthetic construct
  source 1..19: mol_type = other RNA
ccggcggccgccgcctccc

SEQ ID NO: 5681 - RNA, 19 nt, synthetic construct
  source 1..19: mol_type = other RNA
gccggcggccgccgcctcc

SEQ ID NO: 5682 - RNA, 19 nt, synthetic construct
  source 1..19: mol_type = other RNA
cgccggcggccgccgcctc

SEQ ID NO: 5683 - RNA, 19 nt, synthetic construct
  source 1..19: mol_type = other RNA
tcgccggcggccgccgcct

SEQ ID NO: 5684 - RNA, 19 nt, synthetic construct
  source 1..19: mol_type = other RNA
ctcgccggcggccgccgcc

SEQ ID NO: 5685 - RNA, 19 nt, synthetic construct
  source 1..19: mol_type = other RNA
cctcgccggcggccgccgc

SEQ ID NO: 5686 - RNA, 19 nt, synthetic construct
  source 1..19: mol_type = other RNA
gcctcgccggcggccgccg

SEQ ID NO: 5687 - RNA, 19 nt, synthetic construct
  source 1..19: mol_type = other RNA
cgcctcgccggcggccgcc

SEQ ID NO: 5688 - RNA, 19 nt, synthetic construct
  source 1..19: mol_type = other RNA
tcgcctcgccggcggccgc

SEQ ID NO: 5689 - RNA, 19 nt, synthetic construct
  source 1..19: mol_type = other RNA
ctcgcctcgccggcggccg

SEQ ID NO: 5690 - RNA, 19 nt, synthetic construct
  source 1..19: mol_type = other RNA
cctcgcctcgccggcggcc

SEQ ID NO: 5691 - RNA, 19 nt, synthetic construct
  source 1..19: mol_type = other RNA
gcctcgcctcgccggcggc

SEQ ID NO: 5692 - RNA, 19 nt, synthetic construct
  source 1..19: mol_type = other RNA
cgcctcgcctcgccggcgg

SEQ ID NO: 5693 - RNA, 19 nt, synthetic construct
  source 1..19: mol_type = other RNA
ccgcctcgcctcgccggcg

SEQ ID NO: 5694 - RNA, 19 nt, synthetic construct
  source 1..19: mol_type = other RNA
gccgcctcgcctcgccggc

SEQ ID NO: 5695 - RNA, 19 nt, synthetic construct
  source 1..19: mol_type = other RNA
ggccgcctcgcctcgccgg

SEQ ID NO: 5696 - RNA, 19 nt, synthetic construct
  source 1..19: mol_type = other RNA
gggccgcctcgcctcgccg

SEQ ID NO: 5697 - RNA, 19 nt, synthetic construct
  source 1..19: mol_type = other RNA
cgggccgcctcgcctcgcc

SEQ ID NO: 5698 - RNA, 19 nt, synthetic construct
  source 1..19: mol_type = other RNA
gcgggccgcctcgcctcgc

SEQ ID NO: 5699 - RNA, 19 nt, synthetic construct
  source 1..19: mol_type = other RNA
cgcgggccgcctcgcctcg

SEQ ID NO: 5700 - RNA, 19 nt, synthetic construct
  source 1..19: mol_type = other RNA
gcgcgggccgcctcgcctc

SEQ ID NO: 5701 - RNA, 19 nt, synthetic construct
  source 1..19: mol_type = other RNA
ggcgcgggccgcctcgcct

SEQ ID NO: 5702 - RNA, 19 nt, synthetic construct
  source 1..19: mol_type = other RNA
gggcgcgggccgcctcgcc

SEQ ID NO: 5703 - RNA, 19 nt, synthetic construct
  source 1..19: mol_type = other RNA
agggcgcgggccgcctcgc

SEQ ID NO: 5704 - RNA, 19 nt, synthetic construct
  source 1..19: mol_type = other RNA
cagggcgcgggccgcctcg

SEQ ID NO: 5705 - RNA, 19 nt, synthetic construct
  source 1..19: mol_type = other RNA
gcagggcgcgggccgcctc

SEQ ID NO: 5706 - RNA, 19 nt, synthetic construct
  source 1..19: mol_type = other RNA
ggcagggcgcgggccgcct

SEQ ID NO: 5707 - RNA, 19 nt, synthetic construct
  source 1..19: mol_type = other RNA
aggcagggcgcgggccgcc

SEQ ID NO: 5708 - RNA, 19 nt, synthetic construct
  source 1..19: mol_type = other RNA
caggcagggcgcgggccgc

SEQ ID NO: 5709 - RNA, 19 nt, synthetic construct
  source 1..19: mol_type = other RNA
acaggcagggcgcgggccg

SEQ ID NO: 5710 - RNA, 19 nt, synthetic construct
  source 1..19: mol_type = other RNA
gacaggcagggcgcgggcc

SEQ ID NO: 5711 - RNA, 19 nt, synthetic construct
  source 1..19: mol_type = other RNA
tgacaggcagggcgcgggc

SEQ ID NO: 5712 - RNA, 19 nt, synthetic construct
  source 1..19: mol_type = other RNA
ctgacaggcagggcgcggg

SEQ ID NO: 5713 - RNA, 19 nt, synthetic construct
  source 1..19: mol_type = other RNA
cctgacaggcagggcgcgg

SEQ ID NO: 5714 - RNA, 19 nt, synthetic construct
  source 1..19: mol_type = other RNA
gcctgacaggcagggcgcg

SEQ ID NO: 5715 - RNA, 19 nt, synthetic construct
  source 1..19: mol_type = other RNA
ggcctgacaggcagggcgc

SEQ ID NO: 5716 - RNA, 19 nt, synthetic construct
  source 1..19: mol_type = other RNA
tggcctgacaggcagggcg

SEQ ID NO: 5717 - RNA, 19 nt, synthetic construct
  source 1..19: mol_type = other RNA
gtggcctgacaggcagggc

SEQ ID NO: 5718 - RNA, 19 nt, synthetic construct
  source 1..19: mol_type = other RNA
ggtggcctgacaggcaggg

SEQ ID NO: 5719 - RNA, 19 nt, synthetic construct
  source 1..19: mol_type = other RNA
cggtggcctgacaggcagg

SEQ ID NO: 5720 - RNA, 19 nt, synthetic construct
  source 1..19: mol_type = other RNA
ccggtggcctgacaggcag

SEQ ID NO: 5721 - RNA, 19 nt, synthetic construct
  source 1..19: mol_type = other RNA
gccggtggcctgacaggca

SEQ ID NO: 5722 - RNA, 19 nt, synthetic construct
  source 1..19: mol_type = other RNA
ggccggtggcctgacaggc

SEQ ID NO: 5723 - RNA, 19 nt, synthetic construct
  source 1..19: mol_type = other RNA
gggccggtggcctgacagg

SEQ ID NO: 5724 - RNA, 19 nt, synthetic construct
  source 1..19: mol_type = other RNA
cgggccggtggcctgacag

SEQ ID NO: 5725 - RNA, 19 nt, synthetic construct
  source 1..19: mol_type = other RNA
ccgggccggtggcctgaca

SEQ ID NO: 5726 - RNA, 19 nt, synthetic construct
  source 1..19: mol_type = other RNA
gccgggccggtggcctgac

SEQ ID NO: 5727 - RNA, 19 nt, synthetic construct
  source 1..19: mol_type = other RNA
ggccgggccggtggcctga

SEQ ID NO: 5728 - RNA, 19 nt, synthetic construct
  source 1..19: mol_type = other RNA
gggccgggccggtggcctg

SEQ ID NO: 5729 - RNA, 19 nt, synthetic construct
  source 1..19: mol_type = other RNA
cgggccgggccggtggcct

SEQ ID NO: 5730 - RNA, 19 nt, synthetic construct
  source 1..19: mol_type = other RNA
gcgggccgggccggtggcc

SEQ ID NO: 5731 - RNA, 19 nt, synthetic construct
  source 1..19: mol_type = other RNA
cgcgggccgggccggtggc

SEQ ID NO: 5732 - RNA, 19 nt, synthetic construct
  source 1..19: mol_type = other RNA
ccgcgggccgggccggtgg

SEQ ID NO: 5733 - RNA, 19 nt, synthetic construct
  source 1..19: mol_type = other RNA
cccgcgggccgggccggtg

SEQ ID NO: 5734 - RNA, 19 nt, synthetic construct
  source 1..19: mol_type = other RNA
gcccgcgggccgggccggt

SEQ ID NO: 5735 - RNA, 19 nt, synthetic construct
  source 1..19: mol_type = other RNA
agcccgcgggccgggccgg

SEQ ID NO: 5736 - RNA, 19 nt, synthetic construct
  source 1..19: mol_type = other RNA
cagcccgcgggccgggccg

SEQ ID NO: 5737 - RNA, 19 nt, synthetic construct
  source 1..19: mol_type = other RNA
gcagcccgcgggccgggcc

SEQ ID NO: 5738 - RNA, 19 nt, synthetic construct
  source 1..19: mol_type = other RNA
ggcagcccgcgggccgggc

SEQ ID NO: 5739 - RNA, 19 nt, synthetic construct
  source 1..19: mol_type = other RNA
gggcagcccgcgggccggg

SEQ ID NO: 5740 - RNA, 19 nt, synthetic construct
  source 1..19: mol_type = other RNA
ggggcagcccgcgggccgg

SEQ ID NO: 5741 - RNA, 19 nt, synthetic construct
  source 1..19: mol_type = other RNA
gggggcagcccgcgggccg

SEQ ID NO: 5742 - RNA, 19 nt, synthetic construct
  source 1..19: mol_type = other RNA
cgggggcagcccgcgggcc

SEQ ID NO: 5743 - RNA, 19 nt, synthetic construct
  source 1..19: mol_type = other RNA
tcgggggcagcccgcgggc

SEQ ID NO: 5744 - RNA, 19 nt, synthetic construct
  source 1..19: mol_type = other RNA
atcgggggcagcccgcggg

SEQ ID NO: 5745 - RNA, 19 nt, synthetic construct
  source 1..19: mol_type = other RNA
catcgggggcagcccgcgg

SEQ ID NO: 5746 - RNA, 19 nt, synthetic construct
  source 1..19: mol_type = other RNA
gcatcgggggcagcccgcg

SEQ ID NO: 5747 - RNA, 19 nt, synthetic construct
  source 1..19: mol_type = other RNA
cgcatcgggggcagcccgc

SEQ ID NO: 5748 - RNA, 19 nt, synthetic construct
  source 1..19: mol_type = other RNA
ccgcatcgggggcagcccg

SEQ ID NO: 5749 - RNA, 19 nt, synthetic construct
  source 1..19: mol_type = other RNA
tccgcatcgggggcagccc

SEQ ID NO: 5750 - RNA, 19 nt, synthetic construct
  source 1..19: mol_type = other RNA
ctccgcatcgggggcagcc

SEQ ID NO: 5751 - RNA, 19 nt, synthetic construct
  source 1..19: mol_type = other RNA
cctccgcatcgggggcagc

SEQ ID NO: 5752 - RNA, 19 nt, synthetic construct
  source 1..19: mol_type = other RNA
gcctccgcatcgggggcag

SEQ ID NO: 5753 - RNA, 19 nt, synthetic construct
  source 1..19: mol_type = other RNA
cgcctccgcatcgggggca

SEQ ID NO: 5754 - RNA, 19 nt, synthetic construct
  source 1..19: mol_type = other RNA
gcgcctccgcatcgggggc

SEQ ID NO: 5755 - RNA, 19 nt, synthetic construct
  source 1..19: mol_type = other RNA
agcgcctccgcatcggggg

SEQ ID NO: 5756 - RNA, 19 nt, synthetic construct
  source 1..19: mol_type = other RNA
cagcgcctccgcatcgggg

SEQ ID NO: 5757 - RNA, 19 nt, synthetic construct
  source 1..19: mol_type = other RNA
acagcgcctccgcatcggg

SEQ ID NO: 5758 - RNA, 19 nt, synthetic construct
  source 1..19: mol_type = other RNA
gacagcgcctccgcatcgg

SEQ ID NO: 5759 - RNA, 19 nt, synthetic construct
  source 1..19: mol_type = other RNA
cgacagcgcctccgcatcg

SEQ ID NO: 5760 - RNA, 19 nt, synthetic construct
  source 1..19: mol_type = other RNA
gcgacagcgcctccgcatc

SEQ ID NO: 5761 - RNA, 19 nt, synthetic construct
  source 1..19: mol_type = other RNA
ggcgacagcgcctccgcat

SEQ ID NO: 5762 - RNA, 19 nt, synthetic construct
  source 1..19: mol_type = other RNA
cggcgacagcgcctccgca

SEQ ID NO: 5763 - RNA, 19 nt, synthetic construct
  source 1..19: mol_type = other RNA
ccggcgacagcgcctccgc

SEQ ID NO: 5764 - RNA, 19 nt, synthetic construct
  source 1..19: mol_type = other RNA
cccggcgacagcgcctccg

SEQ ID NO: 5765 - RNA, 19 nt, synthetic construct
  source 1..19: mol_type = other RNA
ccccggcgacagcgcctcc

SEQ ID NO: 5766 - RNA, 19 nt, synthetic construct
  source 1..19: mol_type = other RNA
gccccggcgacagcgcctc

SEQ ID NO: 5767 - RNA, 19 nt, synthetic construct
  source 1..19: mol_type = other RNA
ggccccggcgacagcgcct

SEQ ID NO: 5768 - RNA, 19 nt, synthetic construct
  source 1..19: mol_type = other RNA
tggccccggcgacagcgcc

SEQ ID NO: 5769 - RNA, 19 nt, synthetic construct
  source 1..19: mol_type = other RNA
atggccccggcgacagcgc

SEQ ID NO: 5770 - RNA, 19 nt, synthetic construct
  source 1..19: mol_type = other RNA
catggccccggcgacagcg

SEQ ID NO: 5771 - RNA, 19 nt, synthetic construct
  source 1..19: mol_type = other RNA
gcatggccccggcgacagc

SEQ ID NO: 5772 - RNA, 19 nt, synthetic construct
  source 1..19: mol_type = other RNA
tgcatggccccggcgacag

SEQ ID NO: 5773 - RNA, 19 nt, synthetic construct
  source 1..19: mol_type = other RNA
ctgcatggccccggcgaca

SEQ ID NO: 5774 - RNA, 19 nt, synthetic construct
  source 1..19: mol_type = other RNA
gctgcatggccccggcgac

SEQ ID NO: 5775 - RNA, 19 nt, synthetic construct
  source 1..19: mol_type = other RNA
tgctgcatggccccggcga

SEQ ID NO: 5776 - RNA, 19 nt, synthetic construct
  source 1..19: mol_type = other RNA
ctgctgcatggccccggcg

SEQ ID NO: 5777 - RNA, 19 nt, synthetic construct
  source 1..19: mol_type = other RNA
cctgctgcatggccccggc

SEQ ID NO: 5778 - RNA, 19 nt, synthetic construct
  source 1..19: mol_type = other RNA
gcctgctgcatggccccgg

SEQ ID NO: 5779 - RNA, 19 nt, synthetic construct
  source 1..19: mol_type = other RNA
cgcctgctgcatggccccg

SEQ ID NO: 5780 - RNA, 19 nt, synthetic construct
  source 1..19: mol_type = other RNA
gcgcctgctgcatggcccc

SEQ ID NO: 5781 - RNA, 19 nt, synthetic construct
  source 1..19: mol_type = other RNA
ggcgcctgctgcatggccc

SEQ ID NO: 5782 - RNA, 19 nt, synthetic construct
  source 1..19: mol_type = other RNA
cggcgcctgctgcatggcc

SEQ ID NO: 5783 - RNA, 19 nt, synthetic construct
  source 1..19: mol_type = other RNA
gcggcgcctgctgcatggc

SEQ ID NO: 5784 - RNA, 19 nt, synthetic construct
  source 1..19: mol_type = other RNA
tgcggcgcctgctgcatgg

SEQ ID NO: 5785 - RNA, 19 nt, synthetic construct
  source 1..19: mol_type = other RNA
ctgcggcgcctgctgcatg

SEQ ID NO: 5786 - RNA, 19 nt, synthetic construct
  source 1..19: mol_type = other RNA
gctgcggcgcctgctgcat

SEQ ID NO: 5787 - RNA, 19 nt, synthetic construct
  source 1..19: mol_type = other RNA
ggctgcggcgcctgctgca

SEQ ID NO: 5788 - RNA, 19 nt, synthetic construct
  source 1..19: mol_type = other RNA
aggctgcggcgcctgctgc

SEQ ID NO: 5789 - RNA, 19 nt, synthetic construct
  source 1..19: mol_type = other RNA
aaggctgcggcgcctgctg

SEQ ID NO: 5790 - RNA, 19 nt, synthetic construct
  source 1..19: mol_type = other RNA
taaggctgcggcgcctgct

SEQ ID NO: 5791 - RNA, 19 nt, synthetic construct
  source 1..19: mol_type = other RNA
gtaaggctgcggcgcctgc

SEQ ID NO: 5792 - RNA, 19 nt, synthetic construct
  source 1..19: mol_type = other RNA
cgtaaggctgcggcgcctg

SEQ ID NO: 5793 - RNA, 19 nt, synthetic construct
  source 1..19: mol_type = other RNA
tcgtaaggctgcggcgcct

SEQ ID NO: 5794 - RNA, 19 nt, synthetic construct
  source 1..19: mol_type = other RNA
ctcgtaaggctgcggcgcc

SEQ ID NO: 5795 - RNA, 19 nt, synthetic construct
  source 1..19: mol_type = other RNA
actcgtaaggctgcggcgc

SEQ ID NO: 5796 - RNA, 19 nt, synthetic construct
  source 1..19: mol_type = other RNA
aactcgtaaggctgcggcg

SEQ ID NO: 5797 - RNA, 19 nt, synthetic construct
  source 1..19: mol_type = other RNA
gaactcgtaaggctgcggc

SEQ ID NO: 5798 - RNA, 19 nt, synthetic construct
  source 1..19: mol_type = other RNA
agaactcgtaaggctgcgg

SEQ ID NO: 5799 - RNA, 19 nt, synthetic construct
  source 1..19: mol_type = other RNA
aagaactcgtaaggctgcg

SEQ ID NO: 5800 - RNA, 19 nt, synthetic construct
  source 1..19: mol_type = other RNA
gaagaactcgtaaggctgc

SEQ ID NO: 5801 - RNA, 19 nt, synthetic construct
  source 1..19: mol_type = other RNA
tgaagaactcgtaaggctg

SEQ ID NO: 5802 - RNA, 19 nt, synthetic construct
  source 1..19: mol_type = other RNA
ctgaagaactcgtaaggct

SEQ ID NO: 5803 - RNA, 19 nt, synthetic construct
  source 1..19: mol_type = other RNA
gctgaagaactcgtaaggc

SEQ ID NO: 5804 - RNA, 19 nt, synthetic construct
  source 1..19: mol_type = other RNA
cgctgaagaactcgtaagg

SEQ ID NO: 5805 - RNA, 19 nt, synthetic construct
  source 1..19: mol_type = other RNA
tcgctgaagaactcgtaag

SEQ ID NO: 5806 - RNA, 19 nt, synthetic construct
  source 1..19: mol_type = other RNA
ctcgctgaagaactcgtaa

SEQ ID NO: 5807 - RNA, 19 nt, synthetic construct
  source 1..19: mol_type = other RNA
cctcgctgaagaactcgta

SEQ ID NO: 5808 - RNA, 19 nt, synthetic construct
  source 1..19: mol_type = other RNA
tcctcgctgaagaactcgt

SEQ ID NO: 5809 - RNA, 19 nt, synthetic construct
  source 1..19: mol_type = other RNA
ctcctcgctgaagaactcg

SEQ ID NO: 5810 - RNA, 19 nt, synthetic construct
  source 1..19: mol_type = other RNA
tctcctcgctgaagaactc

SEQ ID NO: 5811 - RNA, 19 nt, synthetic construct
  source 1..19: mol_type = other RNA
ttctcctcgctgaagaact

SEQ ID NO: 5812 - RNA, 19 nt, synthetic construct
  source 1..19: mol_type = other RNA
gttctcctcgctgaagaac

SEQ ID NO: 5813 - RNA, 19 nt, synthetic construct
  source 1..19: mol_type = other RNA
tgttctcctcgctgaagaa

SEQ ID NO: 5814 - RNA, 19 nt, synthetic construct
  source 1..19: mol_type = other RNA
ctgttctcctcgctgaaga

SEQ ID NO: 5815 - RNA, 19 nt, synthetic construct
  source 1..19: mol_type = other RNA
actgttctcctcgctgaag

SEQ ID NO: 5816 - RNA, 19 nt, synthetic construct
  source 1..19: mol_type = other RNA
gactgttctcctcgctgaa

SEQ ID NO: 5817 - RNA, 19 nt, synthetic construct
  source 1..19: mol_type = other RNA
ggactgttctcctcgctga

SEQ ID NO: 5818 - RNA, 19 nt, synthetic construct
  source 1..19: mol_type = other RNA
cggactgttctcctcgctg

SEQ ID NO: 5819 - RNA, 19 nt, synthetic construct
  source 1..19: mol_type = other RNA
tcggactgttctcctcgct

SEQ ID NO: 5820 - RNA, 19 nt, synthetic construct
  source 1..19: mol_type = other RNA
ttcggactgttctcctcgc

SEQ ID NO: 5821 - RNA, 19 nt, synthetic construct
  source 1..19: mol_type = other RNA
tttcggactgttctcctcg

SEQ ID NO: 5822 - RNA, 19 nt, synthetic construct
  source 1..19: mol_type = other RNA
atttcggactgttctcctc

SEQ ID NO: 5823 - RNA, 19 nt, synthetic construct
  source 1..19: mol_type = other RNA
catttcggactgttctcct

SEQ ID NO: 5824 - RNA, 19 nt, synthetic construct
  source 1..19: mol_type = other RNA
ccatttcggactgttctcc

SEQ ID NO: 5825 - RNA, 19 nt, synthetic construct
  source 1..19: mol_type = other RNA
gccatttcggactgttctc

SEQ ID NO: 5826 - RNA, 19 nt, synthetic construct
  source 1..19: mol_type = other RNA
cgccatttcggactgttct

SEQ ID NO: 5827 - RNA, 19 nt, synthetic construct
  source 1..19: mol_type = other RNA
ccgccatttcggactgttc

SEQ ID NO: 5828 - RNA, 19 nt, synthetic construct
  source 1..19: mol_type = other RNA
cccgccatttcggactgtt

SEQ ID NO: 5829 - RNA, 19 nt, synthetic construct
  source 1..19: mol_type = other RNA
ccccgccatttcggactgt

SEQ ID NO: 5830 - RNA, 19 nt, synthetic construct
  source 1..19: mol_type = other RNA
tccccgccatttcggactg

SEQ ID NO: 5831 - RNA, 19 nt, synthetic construct
  source 1..19: mol_type = other RNA
gtccccgccatttcggact

SEQ ID NO: 5832 - RNA, 19 nt, synthetic construct
  source 1..19: mol_type = other RNA
agtccccgccatttcggac

SEQ ID NO: 5833 - RNA, 19 nt, synthetic construct
  source 1..19: mol_type = other RNA
cagtccccgccatttcgga

SEQ ID NO: 5834 - RNA, 19 nt, synthetic construct
  source 1..19: mol_type = other RNA
acagtccccgccatttcgg

SEQ ID NO: 5835 - RNA, 19 nt, synthetic construct
  source 1..19: mol_type = other RNA
aacagtccccgccatttcg

SEQ ID NO: 5836 - RNA, 19 nt, synthetic construct
  source 1..19: mol_type = other RNA
caacagtccccgccatttc

SEQ ID NO: 5837 - RNA, 19 nt, synthetic construct
  source 1..19: mol_type = other RNA
ccaacagtccccgccattt

SEQ ID NO: 5838 - RNA, 19 nt, synthetic construct
  source 1..19: mol_type = other RNA
accaacagtccccgccatt

SEQ ID NO: 5839 - RNA, 19 nt, synthetic construct
  source 1..19: mol_type = other RNA
gaccaacagtccccgccat

SEQ ID NO: 5840 - RNA, 19 nt, synthetic construct
  source 1..19: mol_type = other RNA
agaccaacagtccccgcca

SEQ ID NO: 5841 - RNA, 19 nt, synthetic construct
  source 1..19: mol_type = other RNA
gagaccaacagtccccgcc

SEQ ID NO: 5842 - RNA, 19 nt, synthetic construct
  source 1..19: mol_type = other RNA
cgagaccaacagtccccgc

SEQ ID NO: 5843 - RNA, 19 nt, synthetic construct
  source 1..19: mol_type = other RNA
ccgagaccaacagtccccg

SEQ ID NO: 5844 - RNA, 19 nt, synthetic construct
  source 1..19: mol_type = other RNA
gccgagaccaacagtcccc

SEQ ID NO: 5845 - RNA, 19 nt, synthetic construct
  source 1..19: mol_type = other RNA
ggccgagaccaacagtccc

SEQ ID NO: 5846 - RNA, 19 nt, synthetic construct
  source 1..19: mol_type = other RNA
gggccgagaccaacagtcc

SEQ ID NO: 5847 - RNA, 19 nt, synthetic construct
  source 1..19: mol_type = other RNA
agggccgagaccaacagtc

SEQ ID NO: 5848 - RNA, 19 nt, synthetic construct
  source 1..19: mol_type = other RNA
cagggccgagaccaacagt

SEQ ID NO: 5849 - RNA, 19 nt, synthetic construct
  source 1..19: mol_type = other RNA
gcagggccgagaccaacag

SEQ ID NO: 5850 - RNA, 19 nt, synthetic construct
  source 1..19: mol_type = other RNA
cgcagggccgagaccaaca

SEQ ID NO: 5851 - RNA, 19 nt, synthetic construct
  source 1..19: mol_type = other RNA
ccgcagggccgagaccaac

SEQ ID NO: 5852 - RNA, 19 nt, synthetic construct
  source 1..19: mol_type = other RNA
tccgcagggccgagaccaa

SEQ ID NO: 5853 - RNA, 19 nt, synthetic construct
  source 1..19: mol_type = other RNA
ttccgcagggccgagacca

SEQ ID NO: 5854 - RNA, 19 nt, synthetic construct
  source 1..19: mol_type = other RNA
cttccgcagggccgagacc

SEQ ID NO: 5855 - RNA, 19 nt, synthetic construct
  source 1..19: mol_type = other RNA
ccttccgcagggccgagac

SEQ ID NO: 5856 - RNA, 19 nt, synthetic construct
  source 1..19: mol_type = other RNA
accttccgcagggccgaga

SEQ ID NO: 5857 - RNA, 19 nt, synthetic construct
  source 1..19: mol_type = other RNA
aaccttccgcagggccgag

SEQ ID NO: 5858 - RNA, 19 nt, synthetic construct
  source 1..19: mol_type = other RNA
gaaccttccgcagggccga

SEQ ID NO: 5859 - RNA, 19 nt, synthetic construct
  source 1..19: mol_type = other RNA
tgaaccttccgcagggccg

SEQ ID NO: 5860 - RNA, 19 nt, synthetic construct
  source 1..19: mol_type = other RNA
ctgaaccttccgcagggcc

SEQ ID NO: 5861 - RNA, 19 nt, synthetic construct
  source 1..19: mol_type = other RNA
cctgaaccttccgcagggc

SEQ ID NO: 5862 - RNA, 19 nt, synthetic construct
  source 1..19: mol_type = other RNA
tcctgaaccttccgcaggg

SEQ ID NO: 5863 - RNA, 19 nt, synthetic construct
  source 1..19: mol_type = other RNA
ttcctgaaccttccgcagg

SEQ ID NO: 5864 - RNA, 19 nt, synthetic construct
  source 1..19: mol_type = other RNA
gttcctgaaccttccgcag

SEQ ID NO: 5865 - RNA, 19 nt, synthetic construct
  source 1..19: mol_type = other RNA
tgttcctgaaccttccgca

SEQ ID NO: 5866 - RNA, 19 nt, synthetic construct
  source 1..19: mol_type = other RNA
ttgttcctgaaccttccgc

SEQ ID NO: 5867 - RNA, 19 nt, synthetic construct
  source 1..19: mol_type = other RNA
cttgttcctgaaccttccg

SEQ ID NO: 5868 - RNA, 19 nt, synthetic construct
  source 1..19: mol_type = other RNA
acttgttcctgaaccttcc

SEQ ID NO: 5869 - RNA, 19 nt, synthetic construct
  source 1..19: mol_type = other RNA
cacttgttcctgaaccttc

SEQ ID NO: 5870 - RNA, 19 nt, synthetic construct
  source 1..19: mol_type = other RNA
gcacttgttcctgaacctt

SEQ ID NO: 5871 - RNA, 19 nt, synthetic construct
  source 1..19: mol_type = other RNA
tgcacttgttcctgaacct

SEQ ID NO: 5872 - RNA, 19 nt, synthetic construct
  source 1..19: mol_type = other RNA
atgcacttgttcctgaacc

SEQ ID NO: 5873 - RNA, 19 nt, synthetic construct
  source 1..19: mol_type = other RNA
gatgcacttgttcctgaac

SEQ ID NO: 5874 - RNA, 19 nt, synthetic construct
  source 1..19: mol_type = other RNA
ggatgcacttgttcctgaa

SEQ ID NO: 5875 - RNA, 19 nt, synthetic construct
  source 1..19: mol_type = other RNA
gggatgcacttgttcctga

SEQ ID NO: 5876 - RNA, 19 nt, synthetic construct
  source 1..19: mol_type = other RNA
tgggatgcacttgttcctg

SEQ ID NO: 5877 - RNA, 19 nt, synthetic construct
  source 1..19: mol_type = other RNA
gtgggatgcacttgttcct

SEQ ID NO: 5878 - RNA, 19 nt, synthetic construct
  source 1..19: mol_type = other RNA
agtgggatgcacttgttcc

SEQ ID NO: 5879 - RNA, 19 nt, synthetic construct
  source 1..19: mol_type = other RNA
gagtgggatgcacttgttc

SEQ ID NO: 5880 - RNA, 19 nt, synthetic construct
  source 1..19: mol_type = other RNA
agagtgggatgcacttgtt

SEQ ID NO: 5881 - RNA, 19 nt, synthetic construct
  source 1..19: mol_type = other RNA
gagagtgggatgcacttgt

SEQ ID NO: 5882 - RNA, 19 nt, synthetic construct
  source 1..19: mol_type = other RNA
agagagtgggatgcacttg

SEQ ID NO: 5883 - RNA, 19 nt, synthetic construct
  source 1..19: mol_type = other RNA
gagagagtgggatgcactt

SEQ ID NO: 5884 - RNA, 19 nt, synthetic construct
  source 1..19: mol_type = other RNA
tgagagagtgggatgcact

SEQ ID NO: 5885 - RNA, 19 nt, synthetic construct
  source 1..19: mol_type = other RNA
ctgagagagtgggatgcac

SEQ ID NO: 5886 - RNA, 19 nt, synthetic construct
  source 1..19: mol_type = other RNA
gctgagagagtgggatgca

SEQ ID NO: 5887 - RNA, 19 nt, synthetic construct
  source 1..19: mol_type = other RNA
agctgagagagtgggatgc

SEQ ID NO: 5888 - RNA, 19 nt, synthetic construct
  source 1..19: mol_type = other RNA
tagctgagagagtgggatg

SEQ ID NO: 5889 - RNA, 19 nt, synthetic construct
  source 1..19: mol_type = other RNA
ttagctgagagagtgggat

SEQ ID NO: 5890 - RNA, 19 nt, synthetic construct
  source 1..19: mol_type = other RNA
attagctgagagagtggga

SEQ ID NO: 5891 - RNA, 19 nt, synthetic construct
  source 1..19: mol_type = other RNA
cattagctgagagagtggg

SEQ ID NO: 5892 - RNA, 19 nt, synthetic construct
  source 1..19: mol_type = other RNA
tcattagctgagagagtgg

SEQ ID NO: 5893 - RNA, 19 nt, synthetic construct
  source 1..19: mol_type = other RNA
ttcattagctgagagagtg

SEQ ID NO: 5894 - RNA, 19 nt, synthetic construct
  source 1..19: mol_type = other RNA
cttcattagctgagagagt

SEQ ID NO: 5895 - RNA, 19 nt, synthetic construct
  source 1..19: mol_type = other RNA
tcttcattagctgagagag

SEQ ID NO: 5896 - RNA, 19 nt, synthetic construct
  source 1..19: mol_type = other RNA
ctcttcattagctgagaga

SEQ ID NO: 5897 - RNA, 19 nt, synthetic construct
  source 1..19: mol_type = other RNA
actcttcattagctgagag

SEQ ID NO: 5898 - RNA, 19 nt, synthetic construct
  source 1..19: mol_type = other RNA
gactcttcattagctgaga

SEQ ID NO: 5899 - RNA, 19 nt, synthetic construct
  source 1..19: mol_type = other RNA
agactcttcattagctgag

SEQ ID NO: 5900 - RNA, 19 nt, synthetic construct
  source 1..19: mol_type = other RNA
gagactcttcattagctga

SEQ ID NO: 5901 - RNA, 19 nt, synthetic construct
  source 1..19: mol_type = other RNA
agagactcttcattagctg

SEQ ID NO: 5902 - RNA, 19 nt, synthetic construct
  source 1..19: mol_type = other RNA
gagagactcttcattagct

SEQ ID NO: 5903 - RNA, 19 nt, synthetic construct
  source 1..19: mol_type = other RNA
agagagactcttcattagc

SEQ ID NO: 5904 - RNA, 19 nt, synthetic construct
  source 1..19: mol_type = other RNA
tagagagactcttcattag

SEQ ID NO: 5905 - RNA, 19 nt, synthetic construct
  source 1..19: mol_type = other RNA
atagagagactcttcatta

SEQ ID NO: 5906 - RNA, 19 nt, synthetic construct
  source 1..19: mol_type = other RNA
aatagagagactcttcatt

SEQ ID NO: 5907 - RNA, 19 nt, synthetic construct
  source 1..19: mol_type = other RNA
taatagagagactcttcat

SEQ ID NO: 5908 - RNA, 19 nt, synthetic construct
  source 1..19: mol_type = other RNA
ataatagagagactcttca

SEQ ID NO: 5909 - RNA, 19 nt, synthetic construct
  source 1..19: mol_type = other RNA
tataatagagagactcttc

SEQ ID NO: 5910 - RNA, 19 nt, synthetic construct
  source 1..19: mol_type = other RNA
atataatagagagactctt

SEQ ID NO: 5911 - RNA, 19 nt, synthetic construct
  source 1..19: mol_type = other RNA
aatataatagagagactct

SEQ ID NO: 5912 - RNA, 19 nt, synthetic construct
  source 1..19: mol_type = other RNA
caatataatagagagactc

SEQ ID NO: 5913 - RNA, 19 nt, synthetic construct
  source 1..19: mol_type = other RNA
tcaatataatagagagact

SEQ ID NO: 5914 - RNA, 19 nt, synthetic construct
  source 1..19: mol_type = other RNA
ttcaatataatagagagac

SEQ ID NO: 5915 - RNA, 19 nt, synthetic construct
  source 1..19: mol_type = other RNA
cttcaatataatagagaga

SEQ ID NO: 5916 - RNA, 19 nt, synthetic construct
  source 1..19: mol_type = other RNA
tcttcaatataatagagag

SEQ ID NO: 5917 - RNA, 19 nt, synthetic construct
  source 1..19: mol_type = other RNA
ctcttcaatataatagaga

SEQ ID NO: 5918 - RNA, 19 nt, synthetic construct
  source 1..19: mol_type = other RNA
gctcttcaatataatagag

SEQ ID NO: 5919 - RNA, 19 nt, synthetic construct
  source 1..19: mol_type = other RNA
agctcttcaatataataga

SEQ ID NO: 5920 - RNA, 19 nt, synthetic construct
  source 1..19: mol_type = other RNA
cagctcttcaatataatag

SEQ ID NO: 5921 - RNA, 19 nt, synthetic construct
  source 1..19: mol_type = other RNA
tcagctcttcaatataata

SEQ ID NO: 5922 - RNA, 19 nt, synthetic construct
  source 1..19: mol_type = other RNA
atcagctcttcaatataat

SEQ ID NO: 5923 - RNA, 19 nt, synthetic construct
  source 1..19: mol_type = other RNA
aatcagctcttcaatataa

SEQ ID NO: 5924 - RNA, 19 nt, synthetic construct
  source 1..19: mol_type = other RNA
aaatcagctcttcaatata

SEQ ID NO: 5925 - RNA, 19 nt, synthetic construct
  source 1..19: mol_type = other RNA
aaaatcagctcttcaatat

SEQ ID NO: 5926 - RNA, 19 nt, synthetic construct
  source 1..19: mol_type = other RNA
aaaaatcagctcttcaata

SEQ ID NO: 5927 - RNA, 19 nt, synthetic construct
  source 1..19: mol_type = other RNA
gaaaaatcagctcttcaat

SEQ ID NO: 5928 - RNA, 19 nt, synthetic construct
  source 1..19: mol_type = other RNA
tgaaaaatcagctcttcaa

SEQ ID NO: 5929 - RNA, 19 nt, synthetic construct
  source 1..19: mol_type = other RNA
ctgaaaaatcagctcttca

SEQ ID NO: 5930 - RNA, 19 nt, synthetic construct
  source 1..19: mol_type = other RNA
gctgaaaaatcagctcttc

SEQ ID NO: 5931 - RNA, 19 nt, synthetic construct
  source 1..19: mol_type = other RNA
agctgaaaaatcagctctt

SEQ ID NO: 5932 - RNA, 19 nt, synthetic construct
  source 1..19: mol_type = other RNA
cagctgaaaaatcagctct

SEQ ID NO: 5933 - RNA, 19 nt, synthetic construct
  source 1..19: mol_type = other RNA
gcagctgaaaaatcagctc

SEQ ID NO: 5934 - RNA, 19 nt, synthetic construct
  source 1..19: mol_type = other RNA
agcagctgaaaaatcagct

SEQ ID NO: 5935 - RNA, 19 nt, synthetic construct
  source 1..19: mol_type = other RNA
aagcagctgaaaaatcagc

SEQ ID NO: 5936 - RNA, 19 nt, synthetic construct
  source 1..19: mol_type = other RNA
taagcagctgaaaaatcag

SEQ ID NO: 5937 - RNA, 19 nt, synthetic construct
  source 1..19: mol_type = other RNA
ttaagcagctgaaaaatca

SEQ ID NO: 5938 - RNA, 19 nt, synthetic construct
  source 1..19: mol_type = other RNA
attaagcagctgaaaaatc

SEQ ID NO: 5939 - RNA, 19 nt, synthetic construct
  source 1..19: mol_type = other RNA
tattaagcagctgaaaaat

SEQ ID NO: 5940 - RNA, 19 nt, synthetic construct
  source 1..19: mol_type = other RNA
ttattaagcagctgaaaaa

SEQ ID NO: 5941 - RNA, 19 nt, synthetic construct
  source 1..19: mol_type = other RNA
tttattaagcagctgaaaa

SEQ ID NO: 5942 - RNA, 19 nt, synthetic construct
  source 1..19: mol_type = other RNA
atttattaagcagctgaaa

SEQ ID NO: 5943 - RNA, 19 nt, synthetic construct
  source 1..19: mol_type = other RNA
aatttattaagcagctgaa

SEQ ID NO: 5944 - RNA, 19 nt, synthetic construct
  source 1..19: mol_type = other RNA
taatttattaagcagctga

SEQ ID NO: 5945 - RNA, 19 nt, synthetic construct
  source 1..19: mol_type = other RNA
ataatttattaagcagctg

SEQ ID NO: 5946 - RNA, 19 nt, synthetic construct
  source 1..19: mol_type = other RNA
cataatttattaagcagct

SEQ ID NO: 5947 - RNA, 19 nt, synthetic construct
  source 1..19: mol_type = other RNA
gcataatttattaagcagc

SEQ ID NO: 5948 - RNA, 19 nt, synthetic construct
  source 1..19: mol_type = other RNA
tgcataatttattaagcag

SEQ ID NO: 5949 - RNA, 19 nt, synthetic construct
  source 1..19: mol_type = other RNA
atgcataatttattaagca

SEQ ID NO: 5950 - RNA, 19 nt, synthetic construct
  source 1..19: mol_type = other RNA
catgcataatttattaagc

SEQ ID NO: 5951 - RNA, 19 nt, synthetic construct
  source 1..19: mol_type = other RNA
ccatgcataatttattaag

SEQ ID NO: 5952 - RNA, 19 nt, synthetic construct
  source 1..19: mol_type = other RNA
gccatgcataatttattaa

SEQ ID NO: 5953 - RNA, 19 nt, synthetic construct
  source 1..19: mol_type = other RNA
ggccatgcataatttatta

SEQ ID NO: 5954 - RNA, 19 nt, synthetic construct
  source 1..19: mol_type = other RNA
gggccatgcataatttatt

SEQ ID NO: 5955 - RNA, 19 nt, synthetic construct
  source 1..19: mol_type = other RNA
tgggccatgcataatttat

SEQ ID NO: 5956 - RNA, 19 nt, synthetic construct
  source 1..19: mol_type = other RNA
ctgggccatgcataattta

SEQ ID NO: 5957 - RNA, 19 nt, synthetic construct
  source 1..19: mol_type = other RNA
gctgggccatgcataattt

SEQ ID NO: 5958 - RNA, 19 nt, synthetic construct
  source 1..19: mol_type = other RNA
ggctgggccatgcataatt

SEQ ID NO: 5959 - RNA, 19 nt, synthetic construct
  source 1..19: mol_type = other RNA
tggctgggccatgcataat

SEQ ID NO: 5960 - RNA, 19 nt, synthetic construct
  source 1..19: mol_type = other RNA
ttggctgggccatgcataa

SEQ ID NO: 5961 - RNA, 19 nt, synthetic construct
  source 1..19: mol_type = other RNA
cttggctgggccatgcata

SEQ ID NO: 5962 - RNA, 19 nt, synthetic construct
  source 1..19: mol_type = other RNA
ccttggctgggccatgcat

SEQ ID NO: 5963 - RNA, 19 nt, synthetic construct
  source 1..19: mol_type = other RNA
tccttggctgggccatgca

SEQ ID NO: 5964 - RNA, 19 nt, synthetic construct
  source 1..19: mol_type = other RNA
gtccttggctgggccatgc

SEQ ID NO: 5965 - RNA, 19 nt, synthetic construct
  source 1..19: mol_type = other RNA
agtccttggctgggccatg

SEQ ID NO: 5966 - RNA, 19 nt, synthetic construct
  source 1..19: mol_type = other RNA
cagtccttggctgggccat

SEQ ID NO: 5967 - RNA, 19 nt, synthetic construct
  source 1..19: mol_type = other RNA
acagtccttggctgggcca

SEQ ID NO: 5968 - RNA, 19 nt, synthetic construct
  source 1..19: mol_type = other RNA
aacagtccttggctgggcc

SEQ ID NO: 5969 - RNA, 19 nt, synthetic construct
  source 1..19: mol_type = other RNA
gaacagtccttggctgggc

SEQ ID NO: 5970 - RNA, 19 nt, synthetic construct
  source 1..19: mol_type = other RNA
tgaacagtccttggctggg

SEQ ID NO: 5971 - RNA, 19 nt, synthetic construct
  source 1..19: mol_type = other RNA
ttgaacagtccttggctgg

SEQ ID NO: 5972 - RNA, 19 nt, synthetic construct
  source 1..19: mol_type = other RNA
cttgaacagtccttggctg

SEQ ID NO: 5973 - RNA, 19 nt, synthetic construct
  source 1..19: mol_type = other RNA
tcttgaacagtccttggct

SEQ ID NO: 5974 - RNA, 19 nt, synthetic construct
  source 1..19: mol_type = other RNA
atcttgaacagtccttggc

SEQ ID NO: 5975 - RNA, 19 nt, synthetic construct
  source 1..19: mol_type = other RNA
catcttgaacagtccttgg

SEQ ID NO: 5976 - RNA, 19 nt, synthetic construct
  source 1..19: mol_type = other RNA
acatcttgaacagtccttg

SEQ ID NO: 5977 - RNA, 19 nt, synthetic construct
  source 1..19: mol_type = other RNA
tacatcttgaacagtcctt

SEQ ID NO: 5978 - RNA, 19 nt, synthetic construct
  source 1..19: mol_type = other RNA
ctacatcttgaacagtcct

SEQ ID NO: 5979 - RNA, 19 nt, synthetic construct
  source 1..19: mol_type = other RNA
tctacatcttgaacagtcc

SEQ ID NO: 5980 - RNA, 19 nt, synthetic construct
  source 1..19: mol_type = other RNA
ctctacatcttgaacagtc

SEQ ID NO: 5981 - RNA, 19 nt, synthetic construct
  source 1..19: mol_type = other RNA
cctctacatcttgaacagt

SEQ ID NO: 5982 - RNA, 19 nt, synthetic construct
  source 1..19: mol_type = other RNA
tcctctacatcttgaacag

SEQ ID NO: 5983 - RNA, 19 nt, synthetic construct
  source 1..19: mol_type = other RNA
ctcctctacatcttgaaca

SEQ ID NO: 5984 - RNA, 19 nt, synthetic construct
  source 1..19: mol_type = other RNA
gctcctctacatcttgaac

SEQ ID NO: 5985 - RNA, 19 nt, synthetic construct
  source 1..19: mol_type = other RNA
cgctcctctacatcttgaa

SEQ ID NO: 5986 - RNA, 19 nt, synthetic construct
  source 1..19: mol_type = other RNA
tcgctcctctacatcttga

SEQ ID NO: 5987 - RNA, 19 nt, synthetic construct
  source 1..19: mol_type = other RNA
ctcgctcctctacatcttg

SEQ ID NO: 5988 - RNA, 19 nt, synthetic construct
  source 1..19: mol_type = other RNA
actcgctcctctacatctt

SEQ ID NO: 5989 - RNA, 19 nt, synthetic construct
  source 1..19: mol_type = other RNA
aactcgctcctctacatct

SEQ ID NO: 5990 - RNA, 19 nt, synthetic construct
  source 1..19: mol_type = other RNA
gaactcgctcctctacatc

SEQ ID NO: 5991 - RNA, 19 nt, synthetic construct
  source 1..19: mol_type = other RNA
tgaactcgctcctctacat

SEQ ID NO: 5992 - RNA, 19 nt, synthetic construct
  source 1..19: mol_type = other RNA
ctgaactcgctcctctaca

SEQ ID NO: 5993 - RNA, 19 nt, synthetic construct
  source 1..19: mol_type = other RNA
tctgaactcgctcctctac

SEQ ID NO: 5994 - RNA, 19 nt, synthetic construct
  source 1..19: mol_type = other RNA
ttctgaactcgctcctcta

SEQ ID NO: 5995 - RNA, 19 nt, synthetic construct
  source 1..19: mol_type = other RNA
cttctgaactcgctcctct

SEQ ID NO: 5996 - RNA, 19 nt, synthetic construct
  source 1..19: mol_type = other RNA
tcttctgaactcgctcctc

SEQ ID NO: 5997 - RNA, 19 nt, synthetic construct
  source 1..19: mol_type = other RNA
gtcttctgaactcgctcct

SEQ ID NO: 5998 - RNA, 19 nt, synthetic construct
  source 1..19: mol_type = other RNA
ggtcttctgaactcgctcc

SEQ ID NO: 5999 - RNA, 19 nt, synthetic construct
  source 1..19: mol_type = other RNA
aggtcttctgaactcgctc

SEQ ID NO: 6000 - RNA, 19 nt, synthetic construct
  source 1..19: mol_type = other RNA
aaggtcttctgaactcgct

SEQ ID NO: 6001 - RNA, 19 nt, synthetic construct
  source 1..19: mol_type = other RNA
aaaggtcttctgaactcgc

SEQ ID NO: 6002 - RNA, 19 nt, synthetic construct
  source 1..19: mol_type = other RNA
gaaaggtcttctgaactcg

SEQ ID NO: 6003 - RNA, 19 nt, synthetic construct
  source 1..19: mol_type = other RNA
ggaaaggtcttctgaactc

SEQ ID NO: 6004 - RNA, 19 nt, synthetic construct
  source 1..19: mol_type = other RNA
aggaaaggtcttctgaact

SEQ ID NO: 6005 - RNA, 19 nt, synthetic construct
  source 1..19: mol_type = other RNA
gaggaaaggtcttctgaac

SEQ ID NO: 6006 - RNA, 19 nt, synthetic construct
  source 1..19: mol_type = other RNA
tgaggaaaggtcttctgaa

SEQ ID NO: 6007 - RNA, 19 nt, synthetic construct
  source 1..19: mol_type = other RNA
gtgaggaaaggtcttctga

SEQ ID NO: 6008 - RNA, 19 nt, synthetic construct
  source 1..19: mol_type = other RNA
ggtgaggaaaggtcttctg

SEQ ID NO: 6009 - RNA, 19 nt, synthetic construct
  source 1..19: mol_type = other RNA
gggtgaggaaaggtcttct

SEQ ID NO: 6010 - RNA, 19 nt, synthetic construct
  source 1..19: mol_type = other RNA
tgggtgaggaaaggtcttc

SEQ ID NO: 6011 - RNA, 19 nt, synthetic construct
  source 1..19: mol_type = other RNA
ttgggtgaggaaaggtctt

SEQ ID NO: 6012 - RNA, 19 nt, synthetic construct
  source 1..19: mol_type = other RNA
attgggtgaggaaaggtct

SEQ ID NO: 6013 - RNA, 19 nt, synthetic construct
  source 1..19: mol_type = other RNA
aattgggtgaggaaaggtc

SEQ ID NO: 6014 - RNA, 19 nt, synthetic construct
  source 1..19: mol_type = other RNA
caattgggtgaggaaaggt

SEQ ID NO: 6015 - RNA, 19 nt, synthetic construct
  source 1..19: mol_type = other RNA
tcaattgggtgaggaaagg

SEQ ID NO: 6016 - RNA, 19 nt, synthetic construct
  source 1..19: mol_type = other RNA
atcaattgggtgaggaaag

SEQ ID NO: 6017 - RNA, 19 nt, synthetic construct
  source 1..19: mol_type = other RNA
tatcaattgggtgaggaaa

SEQ ID NO: 6018 - RNA, 19 nt, synthetic construct
  source 1..19: mol_type = other RNA
ttatcaattgggtgaggaa

SEQ ID NO: 6019 - RNA, 19 nt, synthetic construct
  source 1..19: mol_type = other RNA
tttatcaattgggtgagga

SEQ ID NO: 6020 - RNA, 19 nt, synthetic construct
  source 1..19: mol_type = other RNA
atttatcaattgggtgagg

SEQ ID NO: 6021 - RNA, 19 nt, synthetic construct
  source 1..19: mol_type = other RNA
catttatcaattgggtgag

SEQ ID NO: 6022 - RNA, 19 nt, synthetic construct
  source 1..19: mol_type = other RNA
ccatttatcaattgggtga

SEQ ID NO: 6023 - RNA, 19 nt, synthetic construct
  source 1..19: mol_type = other RNA
cccatttatcaattgggtg

SEQ ID NO: 6024 - RNA, 19 nt, synthetic construct
  source 1..19: mol_type = other RNA
gcccatttatcaattgggt

SEQ ID NO: 6025 - RNA, 19 nt, synthetic construct
  source 1..19: mol_type = other RNA
ggcccatttatcaattggg

SEQ ID NO: 6026 - RNA, 19 nt, synthetic construct
  source 1..19: mol_type = other RNA
tggcccatttatcaattgg

SEQ ID NO: 6027 - RNA, 19 nt, synthetic construct
  source 1..19: mol_type = other RNA
atggcccatttatcaattg

SEQ ID NO: 6028 - RNA, 19 nt, synthetic construct
  source 1..19: mol_type = other RNA
aatggcccatttatcaatt

SEQ ID NO: 6029 - RNA, 19 nt, synthetic construct
  source 1..19: mol_type = other RNA
caatggcccatttatcaat

SEQ ID NO: 6030 - RNA, 19 nt, synthetic construct
  source 1..19: mol_type = other RNA
gcaatggcccatttatcaa

SEQ ID NO: 6031 - RNA, 19 nt, synthetic construct
  source 1..19: mol_type = other RNA
agcaatggcccatttatca

SEQ ID NO: 6032 - RNA, 19 nt, synthetic construct
  source 1..19: mol_type = other RNA
cagcaatggcccatttatc

SEQ ID NO: 6033 - RNA, 19 nt, synthetic construct
  source 1..19: mol_type = other RNA
tcagcaatggcccatttat

SEQ ID NO: 6034 - RNA, 19 nt, synthetic construct
  source 1..19: mol_type = other RNA
atcagcaatggcccattta

SEQ ID NO: 6035 - RNA, 19 nt, synthetic construct
  source 1..19: mol_type = other RNA
catcagcaatggcccattt

SEQ ID NO: 6036 - RNA, 19 nt, synthetic construct
  source 1..19: mol_type = other RNA
gcatcagcaatggcccatt

SEQ ID NO: 6037 - RNA, 19 nt, synthetic construct
  source 1..19: mol_type = other RNA
tgcatcagcaatggcccat

SEQ ID NO: 6038 - RNA, 19 nt, synthetic construct
  source 1..19: mol_type = other RNA
gtgcatcagcaatggccca

SEQ ID NO: 6039 - RNA, 19 nt, synthetic construct
  source 1..19: mol_type = other RNA
tgtgcatcagcaatggccc

SEQ ID NO: 6040 - RNA, 19 nt, synthetic construct
  source 1..19: mol_type = other RNA
ttgtgcatcagcaatggcc

SEQ ID NO: 6041 - RNA, 19 nt, synthetic construct
  source 1..19: mol_type = other RNA
attgtgcatcagcaatggc

SEQ ID NO: 6042 - RNA, 19 nt, synthetic construct
  source 1..19: mol_type = other RNA
gattgtgcatcagcaatgg

SEQ ID NO: 6043 - RNA, 19 nt, synthetic construct
  source 1..19: mol_type = other RNA
agattgtgcatcagcaatg

SEQ ID NO: 6044 - RNA, 19 nt, synthetic construct
  source 1..19: mol_type = other RNA
cagattgtgcatcagcaat

SEQ ID NO: 6045 - RNA, 19 nt, synthetic construct
  source 1..19: mol_type = other RNA
gcagattgtgcatcagcaa

SEQ ID NO: 6046 - RNA, 19 nt, synthetic construct
  source 1..19: mol_type = other RNA
agcagattgtgcatcagca

SEQ ID NO: 6047 - RNA, 19 nt, synthetic construct
  source 1..19: mol_type = other RNA
tagcagattgtgcatcagc

SEQ ID NO: 6048 - RNA, 19 nt, synthetic construct
  source 1..19: mol_type = other RNA
atagcagattgtgcatcag

SEQ ID NO: 6049 - RNA, 19 nt, synthetic construct
  source 1..19: mol_type = other RNA
tatagcagattgtgcatca

SEQ ID NO: 6050 - RNA, 19 nt, synthetic construct
  source 1..19: mol_type = other RNA
ctatagcagattgtgcatc

SEQ ID NO: 6051 - RNA, 19 nt, synthetic construct
  source 1..19: mol_type = other RNA
tctatagcagattgtgcat

SEQ ID NO: 6052 - RNA, 19 nt, synthetic construct
  source 1..19: mol_type = other RNA
ttctatagcagattgtgca

SEQ ID NO: 6053 - RNA, 19 nt, synthetic construct
  source 1..19: mol_type = other RNA
tttctatagcagattgtgc

SEQ ID NO: 6054 - RNA, 19 nt, synthetic construct
  source 1..19: mol_type = other RNA
ttttctatagcagattgtg

SEQ ID NO: 6055 - RNA, 19 nt, synthetic construct
  source 1..19: mol_type = other RNA
tttttctatagcagattgt

SEQ ID NO: 6056 - RNA, 19 nt, synthetic construct
  source 1..19: mol_type = other RNA
gtttttctatagcagattg

SEQ ID NO: 6057 - RNA, 19 nt, synthetic construct
  source 1..19: mol_type = other RNA
cgtttttctatagcagatt

SEQ ID NO: 6058 - RNA, 19 nt, synthetic construct
  source 1..19: mol_type = other RNA
tcgtttttctatagcagat

SEQ ID NO: 6059 - RNA, 19 nt, synthetic construct
  source 1..19: mol_type = other RNA
ttcgtttttctatagcaga

SEQ ID NO: 6060 - RNA, 19 nt, synthetic construct
  source 1..19: mol_type = other RNA
tttcgtttttctatagcag

SEQ ID NO: 6061 - RNA, 19 nt, synthetic construct
  source 1..19: mol_type = other RNA
ttttcgtttttctatagca

SEQ ID NO: 6062 - RNA, 19 nt, synthetic construct
  source 1..19: mol_type = other RNA
gttttcgtttttctatagc

SEQ ID NO: 6063 - RNA, 19 nt, synthetic construct
  source 1..19: mol_type = other RNA
cgttttcgtttttctatag

SEQ ID NO: 6064 - RNA, 19 nt, synthetic construct
  source 1..19: mol_type = other RNA
tcgttttcgtttttctata

SEQ ID NO: 6065 - RNA, 19 nt, synthetic construct
  source 1..19: mol_type = other RNA
ttcgttttcgtttttctat

SEQ ID NO: 6066 - RNA, 19 nt, synthetic construct
  source 1..19: mol_type = other RNA
cttcgttttcgtttttcta

SEQ ID NO: 6067 - RNA, 19 nt, synthetic construct
  source 1..19: mol_type = other RNA
tcttcgttttcgtttttct

SEQ ID NO: 6068 - RNA, 19 nt, synthetic construct
  source 1..19: mol_type = other RNA
ttcttcgttttcgtttttc

SEQ ID NO: 6069 - RNA, 19 nt, synthetic construct
  source 1..19: mol_type = other RNA
tttcttcgttttcgttttt

SEQ ID NO: 6070 - RNA, 19 nt, synthetic construct
  source 1..19: mol_type = other RNA
atttcttcgttttcgtttt

SEQ ID NO: 6071 - RNA, 19 nt, synthetic construct
  source 1..19: mol_type = other RNA
gatttcttcgttttcgttt

SEQ ID NO: 6072 - RNA, 19 nt, synthetic construct
  source 1..19: mol_type = other RNA
ggatttcttcgttttcgtt

SEQ ID NO: 6073 - RNA, 19 nt, synthetic construct
  source 1..19: mol_type = other RNA
aggatttcttcgttttcgt

SEQ ID NO: 6074 - RNA, 19 nt, synthetic construct
  source 1..19: mol_type = other RNA
gaggatttcttcgttttcg

SEQ ID NO: 6075 - RNA, 19 nt, synthetic construct
  source 1..19: mol_type = other RNA
agaggatttcttcgttttc

SEQ ID NO: 6076 - RNA, 19 nt, synthetic construct
  source 1..19: mol_type = other RNA
aagaggatttcttcgtttt

SEQ ID NO: 6077 - RNA, 19 nt, synthetic construct
  source 1..19: mol_type = other RNA
aaagaggatttcttcgttt

SEQ ID NO: 6078 - RNA, 19 nt, synthetic construct
  source 1..19: mol_type = other RNA
aaaagaggatttcttcgtt

SEQ ID NO: 6079 - RNA, 19 nt, synthetic construct
  source 1..19: mol_type = other RNA
taaaagaggatttcttcgt

SEQ ID NO: 6080 - RNA, 19 nt, synthetic construct
  source 1..19: mol_type = other RNA
gtaaaagaggatttcttcg

SEQ ID NO: 6081 - RNA, 19 nt, synthetic construct
  source 1..19: mol_type = other RNA
agtaaaagaggatttcttc

SEQ ID NO: 6082 - RNA, 19 nt, synthetic construct
  source 1..19: mol_type = other RNA
cagtaaaagaggatttctt

SEQ ID NO: 6083 - RNA, 19 nt, synthetic construct
  source 1..19: mol_type = other RNA
gcagtaaaagaggatttct

SEQ ID NO: 6084 - RNA, 19 nt, synthetic construct
  source 1..19: mol_type = other RNA
ggcagtaaaagaggatttc

SEQ ID NO: 6085 - RNA, 19 nt, synthetic construct
  source 1..19: mol_type = other RNA
aggcagtaaaagaggattt

SEQ ID NO: 6086 - RNA, 19 nt, synthetic construct
  source 1..19: mol_type = other RNA
caggcagtaaaagaggatt

SEQ ID NO: 6087 - RNA, 19 nt, synthetic construct
  source 1..19: mol_type = other RNA
acaggcagtaaaagaggat

SEQ ID NO: 6088 - RNA, 19 nt, synthetic construct
  source 1..19: mol_type = other RNA
cacaggcagtaaaagagga

SEQ ID NO: 6089 - RNA, 19 nt, synthetic construct
  source 1..19: mol_type = other RNA
ccacaggcagtaaaagagg

SEQ ID NO: 6090 - RNA, 19 nt, synthetic construct
  source 1..19: mol_type = other RNA
tccacaggcagtaaaagag

SEQ ID NO: 6091 - RNA, 19 nt, synthetic construct
  source 1..19: mol_type = other RNA
gtccacaggcagtaaaaga

SEQ ID NO: 6092 - RNA, 19 nt, synthetic construct
  source 1..19: mol_type = other RNA
tgtccacaggcagtaaaag

SEQ ID NO: 6093 - RNA, 19 nt, synthetic construct
  source 1..19: mol_type = other RNA
ttgtccacaggcagtaaaa

SEQ ID NO: 6094 - RNA, 19 nt, synthetic construct
  source 1..19: mol_type = other RNA
tttgtccacaggcagtaaa

SEQ ID NO: 6095 - RNA, 19 nt, synthetic construct
  source 1..19: mol_type = other RNA
ttttgtccacaggcagtaa

SEQ ID NO: 6096 - RNA, 19 nt, synthetic construct
  source 1..19: mol_type = other RNA
attttgtccacaggcagta

SEQ ID NO: 6097 - RNA, 19 nt, synthetic construct
  source 1..19: mol_type = other RNA
gattttgtccacaggcagt

SEQ ID NO: 6098 - RNA, 19 nt, synthetic construct
  source 1..19: mol_type = other RNA
ggattttgtccacaggcag

SEQ ID NO: 6099 - RNA, 19 nt, synthetic construct
  source 1..19: mol_type = other RNA
tggattttgtccacaggca

SEQ ID NO: 6100 - RNA, 19 nt, synthetic construct
  source 1..19: mol_type = other RNA
atggattttgtccacaggc

SEQ ID NO: 6101 - RNA, 19 nt, synthetic construct
  source 1..19: mol_type = other RNA
gatggattttgtccacagg

SEQ ID NO: 6102 - RNA, 19 nt, synthetic construct
  source 1..19: mol_type = other RNA
ggatggattttgtccacag

SEQ ID NO: 6103 - RNA, 19 nt, synthetic construct
  source 1..19: mol_type = other RNA
aggatggattttgtccaca

SEQ ID NO: 6104 - RNA, 19 nt, synthetic construct
  source 1..19: mol_type = other RNA
aaggatggattttgtccac

SEQ ID NO: 6105 - RNA, 19 nt, synthetic construct
  source 1..19: mol_type = other RNA
gaaggatggattttgtcca

SEQ ID NO: 6106 - RNA, 19 nt, synthetic construct
  source 1..19: mol_type = other RNA
cgaaggatggattttgtcc

SEQ ID NO: 6107 - RNA, 19 nt, synthetic construct
  source 1..19: mol_type = other RNA
acgaaggatggattttgtc

SEQ ID NO: 6108 - RNA, 19 nt, synthetic construct
  source 1..19: mol_type = other RNA
aacgaaggatggattttgt

SEQ ID NO: 6109 - RNA, 19 nt, synthetic construct
  source 1..19: mol_type = other RNA
caacgaaggatggattttg

SEQ ID NO: 6110 - RNA, 19 nt, synthetic construct
  source 1..19: mol_type = other RNA
tcaacgaaggatggatttt

SEQ ID NO: 6111 - RNA, 19 nt, synthetic construct
  source 1..19: mol_type = other RNA
ttcaacgaaggatggattt

SEQ ID NO: 6112 - RNA, 19 nt, synthetic construct
  source 1..19: mol_type = other RNA
cttcaacgaaggatggatt

SEQ ID NO: 6113 - RNA, 19 nt, synthetic construct
  source 1..19: mol_type = other RNA
ccttcaacgaaggatggat

SEQ ID NO: 6114 - RNA, 19 nt, synthetic construct
  source 1..19: mol_type = other RNA
tccttcaacgaaggatgga

SEQ ID NO: 6115 - RNA, 19 nt, synthetic construct
  source 1..19: mol_type = other RNA
ttccttcaacgaaggatgg

SEQ ID NO: 6116 - RNA, 19 nt, synthetic construct
  source 1..19: mol_type = other RNA
cttccttcaacgaaggatg

SEQ ID NO: 6117 - RNA, 19 nt, synthetic construct
  source 1..19: mol_type = other RNA
acttccttcaacgaaggat

SEQ ID NO: 6118 - RNA, 19 nt, synthetic construct
  source 1..19: mol_type = other RNA
tacttccttcaacgaagga

SEQ ID NO: 6119 - RNA, 19 nt, synthetic construct
  source 1..19: mol_type = other RNA
atacttccttcaacgaagg

SEQ ID NO: 6120 - RNA, 19 nt, synthetic construct
  source 1..19: mol_type = other RNA
aatacttccttcaacgaag

SEQ ID NO: 6121 - RNA, 19 nt, synthetic construct
  source 1..19: mol_type = other RNA
taatacttccttcaacgaa

SEQ ID NO: 6122 - RNA, 19 nt, synthetic construct
  source 1..19: mol_type = other RNA
ctaatacttccttcaacga

SEQ ID NO: 6123 - RNA, 19 nt, synthetic construct
  source 1..19: mol_type = other RNA
cctaatacttccttcaacg

SEQ ID NO: 6124 - RNA, 19 nt, synthetic construct
  source 1..19: mol_type = other RNA
ccctaatacttccttcaac

SEQ ID NO: 6125 - RNA, 19 nt, synthetic construct
  source 1..19: mol_type = other RNA
accctaatacttccttcaa

SEQ ID NO: 6126 - RNA, 19 nt, synthetic construct
  source 1..19: mol_type = other RNA
taccctaatacttccttca

SEQ ID NO: 6127 - RNA, 19 nt, synthetic construct
  source 1..19: mol_type = other RNA
gtaccctaatacttccttc

SEQ ID NO: 6128 - RNA, 19 nt, synthetic construct
  source 1..19: mol_type = other RNA
tgtaccctaatacttcctt

SEQ ID NO: 6129 - RNA, 19 nt, synthetic construct
  source 1..19: mol_type = other RNA
ttgtaccctaatacttcct

SEQ ID NO: 6130 - RNA, 19 nt, synthetic construct
  source 1..19: mol_type = other RNA
tttgtaccctaatacttcc

SEQ ID NO: 6131 - RNA, 19 nt, synthetic construct
  source 1..19: mol_type = other RNA
ctttgtaccctaatacttc

SEQ ID NO: 6132 - RNA, 19 nt, synthetic construct
  source 1..19: mol_type = other RNA
actttgtaccctaatactt

SEQ ID NO: 6133 - RNA, 19 nt, synthetic construct
  source 1..19: mol_type = other RNA
cactttgtaccctaatact

SEQ ID NO: 6134 - RNA, 19 nt, synthetic construct
  source 1..19: mol_type = other RNA
ccactttgtaccctaatac

SEQ ID NO: 6135 - RNA, 19 nt, synthetic construct
  source 1..19: mol_type = other RNA
tccactttgtaccctaata

SEQ ID NO: 6136 - RNA, 19 nt, synthetic construct
  source 1..19: mol_type = other RNA
gtccactttgtaccctaat

SEQ ID NO: 6137 - RNA, 19 nt, synthetic construct
  source 1..19: mol_type = other RNA
agtccactttgtaccctaa

SEQ ID NO: 6138 - RNA, 19 nt, synthetic construct
  source 1..19: mol_type = other RNA
tagtccactttgtacccta

SEQ ID NO: 6139 - RNA, 19 nt, synthetic construct
  source 1..19: mol_type = other RNA
gtagtccactttgtaccct

SEQ ID NO: 6140 - RNA, 19 nt, synthetic construct
  source 1..19: mol_type = other RNA
ggtagtccactttgtaccc

SEQ ID NO: 6141 - RNA, 19 nt, synthetic construct
  source 1..19: mol_type = other RNA
tggtagtccactttgtacc

SEQ ID NO: 6142 - RNA, 19 nt, synthetic construct
  source 1..19: mol_type = other RNA
atggtagtccactttgtac

SEQ ID NO: 6143 - RNA, 19 nt, synthetic construct
  source 1..19: mol_type = other RNA
catggtagtccactttgta

SEQ ID NO: 6144 - RNA, 19 nt, synthetic construct
  source 1..19: mol_type = other RNA
acatggtagtccactttgt

SEQ ID NO: 6145 - RNA, 19 nt, synthetic construct
  source 1..19: mol_type = other RNA
tacatggtagtccactttg

SEQ ID NO: 6146 - RNA, 19 nt, synthetic construct
  source 1..19: mol_type = other RNA
atacatggtagtccacttt

SEQ ID NO: 6147 - RNA, 19 nt, synthetic construct
  source 1..19: mol_type = other RNA
gatacatggtagtccactt

SEQ ID NO: 6148 - RNA, 19 nt, synthetic construct
  source 1..19: mol_type = other RNA
ggatacatggtagtccact

SEQ ID NO: 6149 - RNA, 19 nt, synthetic construct
  source 1..19: mol_type = other RNA
gggatacatggtagtccac

SEQ ID NO: 6150 - RNA, 19 nt, synthetic construct
  source 1..19: mol_type = other RNA
agggatacatggtagtcca

SEQ ID NO: 6151 - RNA, 19 nt, synthetic construct
  source 1..19: mol_type = other RNA
tagggatacatggtagtcc

SEQ ID NO: 6152 - RNA, 19 nt, synthetic construct
  source 1..19: mol_type = other RNA
atagggatacatggtagtc

SEQ ID NO: 6153 - RNA, 19 nt, synthetic construct
  source 1..19: mol_type = other RNA
tatagggatacatggtagt

SEQ ID NO: 6154 - RNA, 19 nt, synthetic construct
  source 1..19: mol_type = other RNA
atatagggatacatggtag

SEQ ID NO: 6155 - RNA, 19 nt, synthetic construct
  source 1..19: mol_type = other RNA
tatatagggatacatggta

SEQ ID NO: 6156 - RNA, 19 nt, synthetic construct
  source 1..19: mol_type = other RNA
atatatagggatacatggt

SEQ ID NO: 6157 - RNA, 19 nt, synthetic construct
  source 1..19: mol_type = other RNA
aatatatagggatacatgg

SEQ ID NO: 6158 - RNA, 19 nt, synthetic construct
  source 1..19: mol_type = other RNA
caatatatagggatacatg

SEQ ID NO: 6159 - RNA, 19 nt, synthetic construct
  source 1..19: mol_type = other RNA
acaatatatagggatacat

SEQ ID NO: 6160 - RNA, 19 nt, synthetic construct
  source 1..19: mol_type = other RNA
cacaatatatagggataca

SEQ ID NO: 6161 - RNA, 19 nt, synthetic construct
  source 1..19: mol_type = other RNA
ccacaatatatagggatac

SEQ ID NO: 6162 - RNA, 19 nt, synthetic construct
  source 1..19: mol_type = other RNA
gccacaatatatagggata

SEQ ID NO: 6163 - RNA, 19 nt, synthetic construct
  source 1..19: mol_type = other RNA
agccacaatatatagggat

SEQ ID NO: 6164 - RNA, 19 nt, synthetic construct
  source 1..19: mol_type = other RNA
cagccacaatatataggga

SEQ ID NO: 6165 - RNA, 19 nt, synthetic construct
  source 1..19: mol_type = other RNA
acagccacaatatataggg

SEQ ID NO: 6166 - RNA, 19 nt, synthetic construct
  source 1..19: mol_type = other RNA
tacagccacaatatatagg

SEQ ID NO: 6167 - RNA, 19 nt, synthetic construct
  source 1..19: mol_type = other RNA
gtacagccacaatatatag

SEQ ID NO: 6168 - RNA, 19 nt, synthetic construct
  source 1..19: mol_type = other RNA
agtacagccacaatatata

SEQ ID NO: 6169 - RNA, 19 nt, synthetic construct
  source 1..19: mol_type = other RNA
tagtacagccacaatatat

SEQ ID NO: 6170 - RNA, 19 nt, synthetic construct
  source 1..19: mol_type = other RNA
ctagtacagccacaatata

SEQ ID NO: 6171 - RNA, 19 nt, synthetic construct
  source 1..19: mol_type = other RNA
tctagtacagccacaatat

SEQ ID NO: 6172 - RNA, 19 nt, synthetic construct
  source 1..19: mol_type = other RNA
ctctagtacagccacaata

SEQ ID NO: 6173 - RNA, 19 nt, synthetic construct
  source 1..19: mol_type = other RNA
actctagtacagccacaat

SEQ ID NO: 6174 - RNA, 19 nt, synthetic construct
  source 1..19: mol_type = other RNA
tactctagtacagccacaa

SEQ ID NO: 6175 - RNA, 19 nt, synthetic construct
  source 1..19: mol_type = other RNA
atactctagtacagccaca

SEQ ID NO: 6176 - RNA, 19 nt, synthetic construct
  source 1..19: mol_type = other RNA
tatactctagtacagccac

SEQ ID NO: 6177 - RNA, 19 nt, synthetic construct
  source 1..19: mol_type = other RNA
atatactctagtacagcca

SEQ ID NO: 6178 - RNA, 19 nt, synthetic construct
  source 1..19: mol_type = other RNA
gatatactctagtacagcc

SEQ ID NO: 6179 - RNA, 19 nt, synthetic construct
  source 1..19: mol_type = other RNA
agatatactctagtacagc

SEQ ID NO: 6180 - RNA, 19 nt, synthetic construct
  source 1..19: mol_type = other RNA
gagatatactctagtacag

SEQ ID NO: 6181 - RNA, 19 nt, synthetic construct
  source 1..19: mol_type = other RNA
tgagatatactctagtaca

SEQ ID NO: 6182 - RNA, 19 nt, synthetic construct
  source 1..19: mol_type = other RNA
ctgagatatactctagtac

SEQ ID NO: 6183 - RNA, 19 nt, synthetic construct
  source 1..19: mol_type = other RNA
gctgagatatactctagta

SEQ ID NO: 6184 - RNA, 19 nt, synthetic construct
  source 1..19: mol_type = other RNA
agctgagatatactctagt

SEQ ID NO: 6185 - RNA, 19 nt, synthetic construct
  source 1..19: mol_type = other RNA
cagctgagatatactctag

SEQ ID NO: 6186 - RNA, 19 nt, synthetic construct
  source 1..19: mol_type = other RNA
tcagctgagatatactcta

SEQ ID NO: 6187 - RNA, 19 nt, synthetic construct
  source 1..19: mol_type = other RNA
atcagctgagatatactct

SEQ ID NO: 6188 - RNA, 19 nt, synthetic construct
  source 1..19: mol_type = other RNA
tatcagctgagatatactc

SEQ ID NO: 6189 - RNA, 19 nt, synthetic construct
  source 1..19: mol_type = other RNA
atatcagctgagatatact

SEQ ID NO: 6190 - RNA, 19 nt, synthetic construct
  source 1..19: mol_type = other RNA
aatatcagctgagatatac

SEQ ID NO: 6191 - RNA, 19 nt, synthetic construct
  source 1..19: mol_type = other RNA
aaatatcagctgagatata

SEQ ID NO: 6192 - RNA, 19 nt, synthetic construct
  source 1..19: mol_type = other RNA
aaaatatcagctgagatat

SEQ ID NO: 6193 - RNA, 19 nt, synthetic construct
  source 1..19: mol_type = other RNA
taaaatatcagctgagata

SEQ ID NO: 6194 - RNA, 19 nt, synthetic construct
  source 1..19: mol_type = other RNA
ttaaaatatcagctgagat

SEQ ID NO: 6195 - RNA, 19 nt, synthetic construct
  source 1..19: mol_type = other RNA
tttaaaatatcagctgaga

SEQ ID NO: 6196 - RNA, 19 nt, synthetic construct
  source 1..19: mol_type = other RNA
ttttaaaatatcagctgag

SEQ ID NO: 6197 - RNA, 19 nt, synthetic construct
  source 1..19: mol_type = other RNA
attttaaaatatcagctga

SEQ ID NO: 6198 - RNA, 19 nt, synthetic construct
  source 1..19: mol_type = other RNA
aattttaaaatatcagctg

SEQ ID NO: 6199 - RNA, 19 nt, synthetic construct
  source 1..19: mol_type = other RNA
caattttaaaatatcagct

SEQ ID NO: 6200 - RNA, 19 nt, synthetic construct
  source 1..19: mol_type = other RNA
ccaattttaaaatatcagc

SEQ ID NO: 6201 - RNA, 19 nt, synthetic construct
  source 1..19: mol_type = other RNA
gccaattttaaaatatcag

SEQ ID NO: 6202 - RNA, 19 nt, synthetic construct
  source 1..19: mol_type = other RNA
agccaattttaaaatatca

SEQ ID NO: 6203 - RNA, 19 nt, synthetic construct
  source 1..19: mol_type = other RNA
cagccaattttaaaatatc

SEQ ID NO: 6204 - RNA, 19 nt, synthetic construct
  source 1..19: mol_type = other RNA
ccagccaattttaaaatat

SEQ ID NO: 6205 - RNA, 19 nt, synthetic construct
  source 1..19: mol_type = other RNA
accagccaattttaaaata

SEQ ID NO: 6206 - RNA, 19 nt, synthetic construct
  source 1..19: mol_type = other RNA
taccagccaattttaaaat

SEQ ID NO: 6207 - RNA, 19 nt, synthetic construct
  source 1..19: mol_type = other RNA
ttaccagccaattttaaaa

SEQ ID NO: 6208 - RNA, 19 nt, synthetic construct
  source 1..19: mol_type = other RNA
attaccagccaattttaaa

SEQ ID NO: 6209 - RNA, 19 nt, synthetic construct
  source 1..19: mol_type = other RNA
aattaccagccaattttaa

SEQ ID NO: 6210 - RNA, 19 nt, synthetic construct
  source 1..19: mol_type = other RNA
taattaccagccaatttta

SEQ ID NO: 6211 - RNA, 19 nt, synthetic construct
  source 1..19: mol_type = other RNA
ataattaccagccaatttt

SEQ ID NO: 6212 - RNA, 19 nt, synthetic construct
  source 1..19: mol_type = other RNA
cataattaccagccaattt

SEQ ID NO: 6213 - RNA, 19 nt, synthetic construct
  source 1..19: mol_type = other RNA
acataattaccagccaatt

SEQ ID NO: 6214 - RNA, 19 nt, synthetic construct
  source 1..19: mol_type = other RNA
aacataattaccagccaat

SEQ ID NO: 6215 - RNA, 19 nt, synthetic construct
  source 1..19: mol_type = other RNA
aaacataattaccagccaa

SEQ ID NO: 6216 - RNA, 19 nt, synthetic construct
  source 1..19: mol_type = other RNA
aaaacataattaccagcca

SEQ ID NO: 6217 - RNA, 19 nt, synthetic construct
  source 1..19: mol_type = other RNA
aaaaacataattaccagcc

SEQ ID NO: 6218 - RNA, 19 nt, synthetic construct
  source 1..19: mol_type = other RNA
taaaaacataattaccagc

SEQ ID NO: 6219 - RNA, 19 nt, synthetic construct
  source 1..19: mol_type = other RNA
ttaaaaacataattaccag

SEQ ID NO: 6220 - RNA, 19 nt, synthetic construct
  source 1..19: mol_type = other RNA
attaaaaacataattacca

SEQ ID NO: 6221 - RNA, 19 nt, synthetic construct
  source 1..19: mol_type = other RNA
tattaaaaacataattacc

SEQ ID NO: 6222 - RNA, 19 nt, synthetic construct
  source 1..19: mol_type = other RNA
atattaaaaacataattac

SEQ ID NO: 6223 - RNA, 19 nt, synthetic construct
  source 1..19: mol_type = other RNA
gatattaaaaacataatta

SEQ ID NO: 6224 - RNA, 19 nt, synthetic construct
  source 1..19: mol_type = other RNA
ggatattaaaaacataatt

SEQ ID NO: 6225 - RNA, 19 nt, synthetic construct
  source 1..19: mol_type = other RNA
cggatattaaaaacataat

SEQ ID NO: 6226 - RNA, 19 nt, synthetic construct
  source 1..19: mol_type = other RNA
ccggatattaaaaacataa

SEQ ID NO: 6227 - RNA, 19 nt, synthetic construct
  source 1..19: mol_type = other RNA
gccggatattaaaaacata

SEQ ID NO: 6228 - RNA, 19 nt, synthetic construct
  source 1..19: mol_type = other RNA
tgccggatattaaaaacat

SEQ ID NO: 6229 - RNA, 19 nt, synthetic construct
  source 1..19: mol_type = other RNA
atgccggatattaaaaaca

SEQ ID NO: 6230 - RNA, 19 nt, synthetic construct
  source 1..19: mol_type = other RNA
aatgccggatattaaaaac

SEQ ID NO: 6231 - RNA, 19 nt, synthetic construct
  source 1..19: mol_type = other RNA
taatgccggatattaaaaa

SEQ ID NO: 6232 - RNA, 19 nt, synthetic construct
  source 1..19: mol_type = other RNA
ataatgccggatattaaaa

SEQ ID NO: 6233 - RNA, 19 nt, synthetic construct
  source 1..19: mol_type = other RNA
cataatgccggatattaaa

SEQ ID NO: 6234 - RNA, 19 nt, synthetic construct
  source 1..19: mol_type = other RNA
tcataatgccggatattaa

SEQ ID NO: 6235 - RNA, 19 nt, synthetic construct
  source 1..19: mol_type = other RNA
ttcataatgccggatatta

SEQ ID NO: 6236 - RNA, 19 nt, synthetic construct
  source 1..19: mol_type = other RNA
tttcataatgccggatatt

SEQ ID NO: 6237 - RNA, 19 nt, synthetic construct
  source 1..19: mol_type = other RNA
atttcataatgccggatat

SEQ ID NO: 6238 - RNA, 19 nt, synthetic construct
  source 1..19: mol_type = other RNA
tatttcataatgccggata

SEQ ID NO: 6239 - RNA, 19 nt, synthetic construct
  source 1..19: mol_type = other RNA
atatttcataatgccggat

SEQ ID NO: 6240 - RNA, 19 nt, synthetic construct
  source 1..19: mol_type = other RNA
gatatttcataatgccgga

SEQ ID NO: 6241 - RNA, 19 nt, synthetic construct
  source 1..19: mol_type = other RNA
agatatttcataatgccgg

SEQ ID NO: 6242 - RNA, 19 nt, synthetic construct
  source 1..19: mol_type = other RNA
gagatatttcataatgccg

SEQ ID NO: 6243 - RNA, 19 nt, synthetic construct
  source 1..19: mol_type = other RNA
tgagatatttcataatgcc

SEQ ID NO: 6244 - RNA, 19 nt, synthetic construct
  source 1..19: mol_type = other RNA
ctgagatatttcataatgc

SEQ ID NO: 6245 - RNA, 19 nt, synthetic construct
  source 1..19: mol_type = other RNA
gctgagatatttcataatg

SEQ ID NO: 6246 - RNA, 19 nt, synthetic construct
  source 1..19: mol_type = other RNA
tgctgagatatttcataat

SEQ ID NO: 6247 - RNA, 19 nt, synthetic construct
  source 1..19: mol_type = other RNA
ctgctgagatatttcataa

SEQ ID NO: 6248 - RNA, 19 nt, synthetic construct
  source 1..19: mol_type = other RNA
cctgctgagatatttcata

SEQ ID NO: 6249 - RNA, 19 nt, synthetic construct
  source 1..19: mol_type = other RNA
tcctgctgagatatttcat

SEQ ID NO: 6250 - RNA, 19 nt, synthetic construct
  source 1..19: mol_type = other RNA
gtcctgctgagatatttca

SEQ ID NO: 6251 - RNA, 19 nt, synthetic construct
  source 1..19: mol_type = other RNA
tgtcctgctgagatatttc

SEQ ID NO: 6252 - RNA, 19 nt, synthetic construct
  source 1..19: mol_type = other RNA
atgtcctgctgagatattt

SEQ ID NO: 6253 - RNA, 19 nt, synthetic construct
  source 1..19: mol_type = other RNA
aatgtcctgctgagatatt

SEQ ID NO: 6254 - RNA, 19 nt, synthetic construct
  source 1..19: mol_type = other RNA
taatgtcctgctgagatat

SEQ ID NO: 6255 - RNA, 19 nt, synthetic construct
  source 1..19: mol_type = other RNA
ttaatgtcctgctgagata

SEQ ID NO: 6256 - RNA, 19 nt, synthetic construct
  source 1..19: mol_type = other RNA
tttaatgtcctgctgagat

SEQ ID NO: 6257 - RNA, 19 nt, synthetic construct
  source 1..19: mol_type = other RNA
ctttaatgtcctgctgaga

SEQ ID NO: 6258 - RNA, 19 nt, synthetic construct
  source 1..19: mol_type = other RNA
actttaatgtcctgctgag

SEQ ID NO: 6259 - RNA, 19 nt, synthetic construct
  source 1..19: mol_type = other RNA
cactttaatgtcctgctga

SEQ ID NO: 6260 - RNA, 19 nt, synthetic construct
  source 1..19: mol_type = other RNA
acactttaatgtcctgctg

SEQ ID NO: 6261 - RNA, 19 nt, synthetic construct
  source 1..19: mol_type = other RNA
gacactttaatgtcctgct

SEQ ID NO: 6262 - RNA, 19 nt, synthetic construct
  source 1..19: mol_type = other RNA
tgacactttaatgtcctgc

SEQ ID NO: 6263 - RNA, 19 nt, synthetic construct
  source 1..19: mol_type = other RNA
ttgacactttaatgtcctg

SEQ ID NO: 6264 - RNA, 19 nt, synthetic construct
  source 1..19: mol_type = other RNA
attgacactttaatgtcct

SEQ ID NO: 6265 - RNA, 19 nt, synthetic construct
  source 1..19: mol_type = other RNA
cattgacactttaatgtcc

SEQ ID NO: 6266 - RNA, 19 nt, synthetic construct
  source 1..19: mol_type = other RNA
acattgacactttaatgtc

SEQ ID NO: 6267 - RNA, 19 nt, synthetic construct
  source 1..19: mol_type = other RNA
cacattgacactttaatgt

SEQ ID NO: 6268 - RNA, 19 nt, synthetic construct
  source 1..19: mol_type = other RNA
acacattgacactttaatg

SEQ ID NO: 6269 - RNA, 19 nt, synthetic construct
  source 1..19: mol_type = other RNA
cacacattgacactttaat

SEQ ID NO: 6270 - RNA, 19 nt, synthetic construct
  source 1..19: mol_type = other RNA
gcacacattgacactttaa

SEQ ID NO: 6271 - RNA, 19 nt, synthetic construct
  source 1..19: mol_type = other RNA
cgcacacattgacacttta

SEQ ID NO: 6272 - RNA, 19 nt, synthetic construct
  source 1..19: mol_type = other RNA
ccgcacacattgacacttt

SEQ ID NO: 6273 - RNA, 19 nt, synthetic construct
  source 1..19: mol_type = other RNA
tccgcacacattgacactt

SEQ ID NO: 6274 - RNA, 19 nt, synthetic construct
  source 1..19: mol_type = other RNA
atccgcacacattgacact

SEQ ID NO: 6275 - RNA, 19 nt, synthetic construct
  source 1..19: mol_type = other RNA
tatccgcacacattgacac

SEQ ID NO: 6276 - RNA, 19 nt, synthetic construct
  source 1..19: mol_type = other RNA
ttatccgcacacattgaca

SEQ ID NO: 6277 - RNA, 19 nt, synthetic construct
  source 1..19: mol_type = other RNA
cttatccgcacacattgac

SEQ ID NO: 6278 - RNA, 19 nt, synthetic construct
  source 1..19: mol_type = other RNA
ccttatccgcacacattga

SEQ ID NO: 6279 - RNA, 19 nt, synthetic construct
  source 1..19: mol_type = other RNA
accttatccgcacacattg

SEQ ID NO: 6280 - RNA, 19 nt, synthetic construct
  source 1..19: mol_type = other RNA
aaccttatccgcacacatt

SEQ ID NO: 6281 - RNA, 19 nt, synthetic construct
  source 1..19: mol_type = other RNA
aaaccttatccgcacacat

SEQ ID NO: 6282 - RNA, 19 nt, synthetic construct
  source 1..19: mol_type = other RNA
aaaaccttatccgcacaca

SEQ ID NO: 6283 - RNA, 19 nt, synthetic construct
  source 1..19: mol_type = other RNA
caaaaccttatccgcacac

SEQ ID NO: 6284 - RNA, 19 nt, synthetic construct
  source 1..19: mol_type = other RNA
tcaaaaccttatccgcaca

SEQ ID NO: 6285 - RNA, 19 nt, synthetic construct
  source 1..19: mol_type = other RNA
atcaaaaccttatccgcac

SEQ ID NO: 6286 - RNA, 19 nt, synthetic construct
  source 1..19: mol_type = other RNA
catcaaaaccttatccgca

SEQ ID NO: 6287 - RNA, 19 nt, synthetic construct
  source 1..19: mol_type = other RNA
ccatcaaaaccttatccgc

SEQ ID NO: 6288 - RNA, 19 nt, synthetic construct
  source 1..19: mol_type = other RNA
tccatcaaaaccttatccg

SEQ ID NO: 6289 - RNA, 19 nt, synthetic construct
  source 1..19: mol_type = other RNA
gtccatcaaaaccttatcc

SEQ ID NO: 6290 - RNA, 19 nt, synthetic construct
  source 1..19: mol_type = other RNA
tgtccatcaaaaccttatc

SEQ ID NO: 6291 - RNA, 19 nt, synthetic construct
  source 1..19: mol_type = other RNA
atgtccatcaaaaccttat

SEQ ID NO: 6292 - RNA, 19 nt, synthetic construct
  source 1..19: mol_type = other RNA
catgtccatcaaaacctta

SEQ ID NO: 6293 - RNA, 19 nt, synthetic construct
  source 1..19: mol_type = other RNA
acatgtccatcaaaacctt

SEQ ID NO: 6294 - RNA, 19 nt, synthetic construct
  source 1..19: mol_type = other RNA
aacatgtccatcaaaacct

SEQ ID NO: 6295 - RNA, 19 nt, synthetic construct
  source 1..19: mol_type = other RNA
aaacatgtccatcaaaacc

SEQ ID NO: 6296 - RNA, 19 nt, synthetic construct
  source 1..19: mol_type = other RNA
caaacatgtccatcaaaac

SEQ ID NO: 6297 - RNA, 19 nt, synthetic construct
  source 1..19: mol_type = other RNA
tcaaacatgtccatcaaaa

SEQ ID NO: 6298 - RNA, 19 nt, synthetic construct
  source 1..19: mol_type = other RNA
atcaaacatgtccatcaaa

SEQ ID NO: 6299 - RNA, 19 nt, synthetic construct
  source 1..19: mol_type = other RNA
gatcaaacatgtccatcaa

SEQ ID NO: 6300 - RNA, 19 nt, synthetic construct
  source 1..19: mol_type = other RNA
tgatcaaacatgtccatca

SEQ ID NO: 6301 - RNA, 19 nt, synthetic construct
  source 1..19: mol_type = other RNA
ctgatcaaacatgtccatc

SEQ ID NO: 6302 - RNA, 19 nt, synthetic construct
  source 1..19: mol_type = other RNA
cctgatcaaacatgtccat

SEQ ID NO: 6303 - RNA, 19 nt, synthetic construct
  source 1..19: mol_type = other RNA
tcctgatcaaacatgtcca

SEQ ID NO: 6304 - RNA, 19 nt, synthetic construct
  source 1..19: mol_type = other RNA
atcctgatcaaacatgtcc

SEQ ID NO: 6305 - RNA, 19 nt, synthetic construct
  source 1..19: mol_type = other RNA
catcctgatcaaacatgtc

SEQ ID NO: 6306 - RNA, 19 nt, synthetic construct
  source 1..19: mol_type = other RNA
tcatcctgatcaaacatgt

SEQ ID NO: 6307 - RNA, 19 nt, synthetic construct
  source 1..19: mol_type = other RNA
gtcatcctgatcaaacatg

SEQ ID NO: 6308 - RNA, 19 nt, synthetic construct
  source 1..19: mol_type = other RNA
tgtcatcctgatcaaacat

SEQ ID NO: 6309 - RNA, 19 nt, synthetic construct
  source 1..19: mol_type = other RNA
atgtcatcctgatcaaaca

SEQ ID NO: 6310 - RNA, 19 nt, synthetic construct
  source 1..19: mol_type = other RNA
tatgtcatcctgatcaaac

SEQ ID NO: 6311 - RNA, 19 nt, synthetic construct
  source 1..19: mol_type = other RNA
ctatgtcatcctgatcaaa

SEQ ID NO: 6312 - RNA, 19 nt, synthetic construct
  source 1..19: mol_type = other RNA
cctatgtcatcctgatcaa

SEQ ID NO: 6313 - RNA, 19 nt, synthetic construct
  source 1..19: mol_type = other RNA
acctatgtcatcctgatca

SEQ ID NO: 6314 - RNA, 19 nt, synthetic construct
  source 1..19: mol_type = other RNA
aacctatgtcatcctgatc

SEQ ID NO: 6315 - RNA, 19 nt, synthetic construct
  source 1..19: mol_type = other RNA
aaacctatgtcatcctgat

SEQ ID NO: 6316 - RNA, 19 nt, synthetic construct
  source 1..19: mol_type = other RNA
caaacctatgtcatcctga

SEQ ID NO: 6317 - RNA, 19 nt, synthetic construct
  source 1..19: mol_type = other RNA
ccaaacctatgtcatcctg

SEQ ID NO: 6318 - RNA, 19 nt, synthetic construct
  source 1..19: mol_type = other RNA
accaaacctatgtcatcct

SEQ ID NO: 6319 - RNA, 19 nt, synthetic construct
  source 1..19: mol_type = other RNA
aaccaaacctatgtcatcc

SEQ ID NO: 6320 - RNA, 19 nt, synthetic construct
  source 1..19: mol_type = other RNA
aaaccaaacctatgtcatc

SEQ ID NO: 6321 - RNA, 19 nt, synthetic construct
  source 1..19: mol_type = other RNA
gaaaccaaacctatgtcat

SEQ ID NO: 6322 - RNA, 19 nt, synthetic construct
  source 1..19: mol_type = other RNA
agaaaccaaacctatgtca

SEQ ID NO: 6323 - RNA, 19 nt, synthetic construct
  source 1..19: mol_type = other RNA
gagaaaccaaacctatgtc

SEQ ID NO: 6324 - RNA, 19 nt, synthetic construct
  source 1..19: mol_type = other RNA
agagaaaccaaacctatgt

SEQ ID NO: 6325 - RNA, 19 nt, synthetic construct
  source 1..19: mol_type = other RNA
gagagaaaccaaacctatg

SEQ ID NO: 6326 - RNA, 19 nt, synthetic construct
  source 1..19: mol_type = other RNA
agagagaaaccaaacctat

SEQ ID NO: 6327 - RNA, 19 nt, synthetic construct
  source 1..19: mol_type = other RNA
cagagagaaaccaaaccta

SEQ ID NO: 6328 - RNA, 19 nt, synthetic construct
  source 1..19: mol_type = other RNA
acagagagaaaccaaacct

SEQ ID NO: 6329 - RNA, 19 nt, synthetic construct
  source 1..19: mol_type = other RNA
cacagagagaaaccaaacc

SEQ ID NO: 6330 - RNA, 19 nt, synthetic construct
  source 1..19: mol_type = other RNA
tcacagagagaaaccaaac

SEQ ID NO: 6331 - RNA, 19 nt, synthetic construct
  source 1..19: mol_type = other RNA
ttcacagagagaaaccaaa

SEQ ID NO: 6332 - RNA, 19 nt, synthetic construct
  source 1..19: mol_type = other RNA
cttcacagagagaaaccaa

SEQ ID NO: 6333 - RNA, 19 nt, synthetic construct
  source 1..19: mol_type = other RNA
tcttcacagagagaaacca

SEQ ID NO: 6334 - RNA, 19 nt, synthetic construct
  source 1..19: mol_type = other RNA
atcttcacagagagaaacc

SEQ ID NO: 6335 - RNA, 19 nt, synthetic construct
  source 1..19: mol_type = other RNA
catcttcacagagagaaac

SEQ ID NO: 6336 - RNA, 19 nt, synthetic construct
  source 1..19: mol_type = other RNA
tcatcttcacagagagaaa

SEQ ID NO: 6337 - RNA, 19 nt, synthetic construct
  source 1..19: mol_type = other RNA
ttcatcttcacagagagaa

SEQ ID NO: 6338 - RNA, 19 nt, synthetic construct
  source 1..19: mol_type = other RNA
gttcatcttcacagagaga

SEQ ID NO: 6339 - RNA, 19 nt, synthetic construct
  source 1..19: mol_type = other RNA
ggttcatcttcacagagag

SEQ ID NO: 6340 - RNA, 19 nt, synthetic construct
  source 1..19: mol_type = other RNA
aggttcatcttcacagaga

SEQ ID NO: 6341 - RNA, 19 nt, synthetic construct
  source 1..19: mol_type = other RNA
taggttcatcttcacagag

SEQ ID NO: 6342 - RNA, 19 nt, synthetic construct
  source 1..19: mol_type = other RNA
ctaggttcatcttcacaga

SEQ ID NO: 6343 - RNA, 19 nt, synthetic construct
  source 1..19: mol_type = other RNA
actaggttcatcttcacag

SEQ ID NO: 6344 - RNA, 19 nt, synthetic construct
  source 1..19: mol_type = other RNA
aactaggttcatcttcaca

SEQ ID NO: 6345 - RNA, 19 nt, synthetic construct
  source 1..19: mol_type = other RNA
gaactaggttcatcttcac

SEQ ID NO: 6346 - RNA, 19 nt, synthetic construct
  source 1..19: mol_type = other RNA
agaactaggttcatcttca

SEQ ID NO: 6347 - RNA, 19 nt, synthetic construct
  source 1..19: mol_type = other RNA
aagaactaggttcatcttc

SEQ ID NO: 6348 - RNA, 19 nt, synthetic construct
  source 1..19: mol_type = other RNA
gaagaactaggttcatctt

SEQ ID NO: 6349 - RNA, 19 nt, synthetic construct
  source 1..19: mol_type = other RNA
agaagaactaggttcatct

SEQ ID NO: 6350 - RNA, 19 nt, synthetic construct
  source 1..19: mol_type = other RNA
cagaagaactaggttcatc

SEQ ID NO: 6351 - RNA, 19 nt, synthetic construct
  source 1..19: mol_type = other RNA
ccagaagaactaggttcat

SEQ ID NO: 6352 - RNA, 19 nt, synthetic construct
  source 1..19: mol_type = other RNA
accagaagaactaggttca

SEQ ID NO: 6353 - RNA, 19 nt, synthetic construct
  source 1..19: mol_type = other RNA
caccagaagaactaggttc

SEQ ID NO: 6354 - RNA, 19 nt, synthetic construct
  source 1..19: mol_type = other RNA
tcaccagaagaactaggtt

SEQ ID NO: 6355 - RNA, 19 nt, synthetic construct
  source 1..19: mol_type = other RNA
ttcaccagaagaactaggt

SEQ ID NO: 6356 - RNA, 19 nt, synthetic construct
  source 1..19: mol_type = other RNA
attcaccagaagaactagg

SEQ ID NO: 6357 - RNA, 19 nt, synthetic construct
  source 1..19: mol_type = other RNA
aattcaccagaagaactag

SEQ ID NO: 6358 - RNA, 19 nt, synthetic construct
  source 1..19: mol_type = other RNA
taattcaccagaagaacta

SEQ ID NO: 6359 - RNA, 19 nt, synthetic construct
  source 1..19: mol_type = other RNA
ttaattcaccagaagaact

SEQ ID NO: 6360 - RNA, 19 nt, synthetic construct
  source 1..19: mol_type = other RNA
tttaattcaccagaagaac

SEQ ID NO: 6361 - RNA, 19 nt, synthetic construct
  source 1..19: mol_type = other RNA
gtttaattcaccagaagaa

SEQ ID NO: 6362 - RNA, 19 nt, synthetic construct
  source 1..19: mol_type = other RNA
agtttaattcaccagaaga

SEQ ID NO: 6363 - RNA, 19 nt, synthetic construct
  source 1..19: mol_type = other RNA
tagtttaattcaccagaag

SEQ ID NO: 6364 - RNA, 19 nt, synthetic construct
  source 1..19: mol_type = other RNA
gtagtttaattcaccagaa

SEQ ID NO: 6365 - RNA, 19 nt, synthetic construct
  source 1..19: mol_type = other RNA
agtagtttaattcaccaga

SEQ ID NO: 6366 - RNA, 19 nt, synthetic construct
  source 1..19: mol_type = other RNA
tagtagtttaattcaccag

SEQ ID NO: 6367 - RNA, 19 nt, synthetic construct
  source 1..19: mol_type = other RNA
atagtagtttaattcacca

SEQ ID NO: 6368 - RNA, 19 nt, synthetic construct
  source 1..19: mol_type = other RNA
catagtagtttaattcacc

SEQ ID NO: 6369 - RNA, 19 nt, synthetic construct
  source 1..19: mol_type = other RNA
tcatagtagtttaattcac

SEQ ID NO: 6370 - RNA, 19 nt, synthetic construct
  source 1..19: mol_type = other RNA
atcatagtagtttaattca

SEQ ID NO: 6371 - RNA, 19 nt, synthetic construct
  source 1..19: mol_type = other RNA
gatcatagtagtttaattc

SEQ ID NO: 6372 - RNA, 19 nt, synthetic construct
  source 1..19: mol_type = other RNA
agatcatagtagtttaatt

SEQ ID NO: 6373 - RNA, 19 nt, synthetic construct
  source 1..19: mol_type = other RNA
aagatcatagtagtttaat

SEQ ID NO: 6374 - RNA, 19 nt, synthetic construct
  source 1..19: mol_type = other RNA
caagatcatagtagtttaa

SEQ ID NO: 6375 - RNA, 19 nt, synthetic construct
  source 1..19: mol_type = other RNA
acaagatcatagtagttta

SEQ ID NO: 6376 - RNA, 19 nt, synthetic construct
  source 1..19: mol_type = other RNA
gacaagatcatagtagttt

SEQ ID NO: 6377 - RNA, 19 nt, synthetic construct
  source 1..19: mol_type = other RNA
tgacaagatcatagtagtt

SEQ ID NO: 6378 - RNA, 19 nt, synthetic construct
  source 1..19: mol_type = other RNA
ctgacaagatcatagtagt

SEQ ID NO: 6379 - RNA, 19 nt, synthetic construct
  source 1..19: mol_type = other RNA
tctgacaagatcatagtag

SEQ ID NO: 6380 - RNA, 19 nt, synthetic construct
  source 1..19: mol_type = other RNA
ttctgacaagatcatagta

SEQ ID NO: 6381 - RNA, 19 nt, synthetic construct
  source 1..19: mol_type = other RNA
gttctgacaagatcatagt

SEQ ID NO: 6382 - RNA, 19 nt, synthetic construct
  source 1..19: mol_type = other RNA
agttctgacaagatcatag

SEQ ID NO: 6383 - RNA, 19 nt, synthetic construct
  source 1..19: mol_type = other RNA
cagttctgacaagatcata

SEQ ID NO: 6384 - RNA, 19 nt, synthetic construct
  source 1..19: mol_type = other RNA
tcagttctgacaagatcat

SEQ ID NO: 6385 - RNA, 19 nt, synthetic construct
  source 1..19: mol_type = other RNA
ttcagttctgacaagatca

SEQ ID NO: 6386 - RNA, 19 nt, synthetic construct
  source 1..19: mol_type = other RNA
tttcagttctgacaagatc

SEQ ID NO: 6387 - RNA, 19 nt, synthetic construct
  source 1..19: mol_type = other RNA
atttcagttctgacaagat

SEQ ID NO: 6388 - RNA, 19 nt, synthetic construct
  source 1..19: mol_type = other RNA
gatttcagttctgacaaga

SEQ ID NO: 6389 - RNA, 19 nt, synthetic construct
  source 1..19: mol_type = other RNA
cgatttcagttctgacaag

SEQ ID NO: 6390 - RNA, 19 nt, synthetic construct
  source 1..19: mol_type = other RNA
gcgatttcagttctgacaa

SEQ ID NO: 6391 - RNA, 19 nt, synthetic construct
  source 1..19: mol_type = other RNA
tgcgatttcagttctgaca

SEQ ID NO: 6392 - RNA, 19 nt, synthetic construct
  source 1..19: mol_type = other RNA
ctgcgatttcagttctgac

SEQ ID NO: 6393 - RNA, 19 nt, synthetic construct
  source 1..19: mol_type = other RNA
tctgcgatttcagttctga

SEQ ID NO: 6394 - RNA, 19 nt, synthetic construct
  source 1..19: mol_type = other RNA
ttctgcgatttcagttctg

SEQ ID NO: 6395 - RNA, 19 nt, synthetic construct
  source 1..19: mol_type = other RNA
cttctgcgatttcagttct

SEQ ID NO: 6396 - RNA, 19 nt, synthetic construct
  source 1..19: mol_type = other RNA
tcttctgcgatttcagttc

SEQ ID NO: 6397 - RNA, 19 nt, synthetic construct
  source 1..19: mol_type = other RNA
ttcttctgcgatttcagtt

SEQ ID NO: 6398 - RNA, 19 nt, synthetic construct
  source 1..19: mol_type = other RNA
tttcttctgcgatttcagt

SEQ ID NO: 6399 - RNA, 19 nt, synthetic construct
  source 1..19: mol_type = other RNA
ctttcttctgcgatttcag

SEQ ID NO: 6400 - RNA, 19 nt, synthetic construct
  source 1..19: mol_type = other RNA
tctttcttctgcgatttca

SEQ ID NO: 6401 - RNA, 19 nt, synthetic construct
  source 1..19: mol_type = other RNA
gtctttcttctgcgatttc

SEQ ID NO: 6402 - RNA, 19 nt, synthetic construct
  source 1..19: mol_type = other RNA
tgtctttcttctgcgattt

SEQ ID NO: 6403 - RNA, 19 nt, synthetic construct
  source 1..19: mol_type = other RNA
ctgtctttcttctgcgatt

SEQ ID NO: 6404 - RNA, 19 nt, synthetic construct
  source 1..19: mol_type = other RNA
actgtctttcttctgcgat

SEQ ID NO: 6405 - RNA, 19 nt, synthetic construct
  source 1..19: mol_type = other RNA
tactgtctttcttctgcga

SEQ ID NO: 6406 - RNA, 19 nt, synthetic construct
  source 1..19: mol_type = other RNA
atactgtctttcttctgcg

SEQ ID NO: 6407 - RNA, 19 nt, synthetic construct
  source 1..19: mol_type = other RNA
gatactgtctttcttctgc

SEQ ID NO: 6408 - RNA, 19 nt, synthetic construct
  source 1..19: mol_type = other RNA
agatactgtctttcttctg

SEQ ID NO: 6409 - RNA, 19 nt, synthetic construct
  source 1..19: mol_type = other RNA
tagatactgtctttcttct

SEQ ID NO: 6410 - RNA, 19 nt, synthetic construct
  source 1..19: mol_type = other RNA
gtagatactgtctttcttc

SEQ ID NO: 6411 - RNA, 19 nt, synthetic construct
  source 1..19: mol_type = other RNA
cgtagatactgtctttctt

SEQ ID NO: 6412 - RNA, 19 nt, synthetic construct
  source 1..19: mol_type = other RNA
ccgtagatactgtctttct

SEQ ID NO: 6413 - RNA, 19 nt, synthetic construct
  source 1..19: mol_type = other RNA
cccgtagatactgtctttc

SEQ ID NO: 6414 - RNA, 19 nt, synthetic construct
  source 1..19: mol_type = other RNA
tcccgtagatactgtcttt

SEQ ID NO: 6415 - RNA, 19 nt, synthetic construct
  source 1..19: mol_type = other RNA
ttcccgtagatactgtctt

SEQ ID NO: 6416 - RNA, 19 nt, synthetic construct
  source 1..19: mol_type = other RNA
attcccgtagatactgtct

SEQ ID NO: 6417 - RNA, 19 nt, synthetic construct
  source 1..19: mol_type = other RNA
aattcccgtagatactgtc

SEQ ID NO: 6418 - RNA, 19 nt, synthetic construct
  source 1..19: mol_type = other RNA
taattcccgtagatactgt

SEQ ID NO: 6419 - RNA, 19 nt, synthetic construct
  source 1..19: mol_type = other RNA
ttaattcccgtagatactg

SEQ ID NO: 6420 - RNA, 19 nt, synthetic construct
  source 1..19: mol_type = other RNA
tttaattcccgtagatact

SEQ ID NO: 6421 - RNA, 19 nt, synthetic construct
  source 1..19: mol_type = other RNA
atttaattcccgtagatac

SEQ ID NO: 6422 - RNA, 19 nt, synthetic construct
  source 1..19: mol_type = other RNA
tatttaattcccgtagata

SEQ ID NO: 6423 - RNA, 19 nt, synthetic construct
  source 1..19: mol_type = other RNA
atatttaattcccgtagat

SEQ ID NO: 6424 - RNA, 19 nt, synthetic construct
  source 1..19: mol_type = other RNA
catatttaattcccgtaga

SEQ ID NO: 6425 - RNA, 19 nt, synthetic construct
  source 1..19: mol_type = other RNA
tcatatttaattcccgtag

SEQ ID NO: 6426 - RNA, 19 nt, synthetic construct
  source 1..19: mol_type = other RNA
atcatatttaattcccgta

SEQ ID NO: 6427 - RNA, 19 nt, synthetic construct
  source 1..19: mol_type = other RNA
gatcatatttaattcccgt

SEQ ID NO: 6428 - RNA, 19 nt, synthetic construct
  source 1..19: mol_type = other RNA
tgatcatatttaattcccg

SEQ ID NO: 6429 - RNA, 19 nt, synthetic construct
  source 1..19: mol_type = other RNA
atgatcatatttaattccc

SEQ ID NO: 6430 - RNA, 19 nt, synthetic construct
  source 1..19: mol_type = other RNA
tatgatcatatttaattcc

SEQ ID NO: 6431 - RNA, 19 nt, synthetic construct
  source 1..19: mol_type = other RNA
ttatgatcatatttaattc

SEQ ID NO: 6432 - RNA, 19 nt, synthetic construct
  source 1..19: mol_type = other RNA
tttatgatcatatttaatt

SEQ ID NO: 6433 - RNA, 19 nt, synthetic construct
  source 1..19: mol_type = other RNA
ttttatgatcatatttaat

SEQ ID NO: 6434 - RNA, 19 nt, synthetic construct
  source 1..19: mol_type = other RNA
cttttatgatcatatttaa

SEQ ID NO: 6435 - RNA, 19 nt, synthetic construct
  source 1..19: mol_type = other RNA
acttttatgatcatattta

SEQ ID NO: 6436 - RNA, 19 nt, synthetic construct
  source 1..19: mol_type = other RNA
cacttttatgatcatattt

SEQ ID NO: 6437 - RNA, 19 nt, synthetic construct
  source 1..19: mol_type = other RNA
acacttttatgatcatatt

SEQ ID NO: 6438 - RNA, 19 nt, synthetic construct
  source 1..19: mol_type = other RNA
aacacttttatgatcatat

SEQ ID NO: 6439 - RNA, 19 nt, synthetic construct
  source 1..19: mol_type = other RNA
aaacacttttatgatcata

SEQ ID NO: 6440 - RNA, 19 nt, synthetic construct
  source 1..19: mol_type = other RNA
gaaacacttttatgatcat

SEQ ID NO: 6441 - RNA, 19 nt, synthetic construct
  source 1..19: mol_type = other RNA
cgaaacacttttatgatca

SEQ ID NO: 6442 - RNA, 19 nt, synthetic construct
  source 1..19: mol_type = other RNA
tcgaaacacttttatgatc

SEQ ID NO: 6443 - RNA, 19 nt, synthetic construct
  source 1..19: mol_type = other RNA
ctcgaaacacttttatgat

SEQ ID NO: 6444 - RNA, 19 nt, synthetic construct
  source 1..19: mol_type = other RNA
tctcgaaacacttttatga

SEQ ID NO: 6445 - RNA, 19 nt, synthetic construct
  source 1..19: mol_type = other RNA
ttctcgaaacacttttatg

SEQ ID NO: 6446 - RNA, 19 nt, synthetic construct
  source 1..19: mol_type = other RNA
cttctcgaaacacttttat

SEQ ID NO: 6447 - RNA, 19 nt, synthetic construct
  source 1..19: mol_type = other RNA
gcttctcgaaacactttta

SEQ ID NO: 6448 - RNA, 19 nt, synthetic construct
  source 1..19: mol_type = other RNA
ggcttctcgaaacactttt

SEQ ID NO: 6449 - RNA, 19 nt, synthetic construct
  source 1..19: mol_type = other RNA
aggcttctcgaaacacttt

SEQ ID NO: 6450 - RNA, 19 nt, synthetic construct
  source 1..19: mol_type = other RNA
aaggcttctcgaaacactt

SEQ ID NO: 6451 - RNA, 19 nt, synthetic construct
  source 1..19: mol_type = other RNA
aaaggcttctcgaaacact

SEQ ID NO: 6452 - RNA, 19 nt, synthetic construct
  source 1..19: mol_type = other RNA
gaaaggcttctcgaaacac

SEQ ID NO: 6453 - RNA, 19 nt, synthetic construct
  source 1..19: mol_type = other RNA
agaaaggcttctcgaaaca

SEQ ID NO: 6454 - RNA, 19 nt, synthetic construct
  source 1..19: mol_type = other RNA
aagaaaggcttctcgaaac

SEQ ID NO: 6455 - RNA, 19 nt, synthetic construct
  source 1..19: mol_type = other RNA
aaagaaaggcttctcgaaa

SEQ ID NO: 6456 - RNA, 19 nt, synthetic construct
  source 1..19: mol_type = other RNA
gaaagaaaggcttctcgaa

SEQ ID NO: 6457 - RNA, 19 nt, synthetic construct
  source 1..19: mol_type = other RNA
agaaagaaaggcttctcga

SEQ ID NO: 6458 - RNA, 19 nt, synthetic construct
  source 1..19: mol_type = other RNA
cagaaagaaaggcttctcg

SEQ ID NO: 6459 - RNA, 19 nt, synthetic construct
  source 1..19: mol_type = other RNA
tcagaaagaaaggcttctc

SEQ ID NO: 6460 - RNA, 19 nt, synthetic construct
  source 1..19: mol_type = other RNA
atcagaaagaaaggcttct

SEQ ID NO: 6461 - RNA, 19 nt, synthetic construct
  source 1..19: mol_type = other RNA
tatcagaaagaaaggcttc

SEQ ID NO: 6462 - RNA, 19 nt, synthetic construct
  source 1..19: mol_type = other RNA
ctatcagaaagaaaggctt

SEQ ID NO: 6463 - RNA, 19 nt, synthetic construct
  source 1..19: mol_type = other RNA
tctatcagaaagaaaggct

SEQ ID NO: 6464 - RNA, 19 nt, synthetic construct
  source 1..19: mol_type = other RNA
ttctatcagaaagaaaggc

SEQ ID NO: 6465 - RNA, 19 nt, synthetic construct
  source 1..19: mol_type = other RNA
tttctatcagaaagaaagg

SEQ ID NO: 6466 - RNA, 19 nt, synthetic construct
  source 1..19: mol_type = other RNA
ctttctatcagaaagaaag

SEQ ID NO: 6467 - RNA, 19 nt, synthetic construct
  source 1..19: mol_type = other RNA
gctttctatcagaaagaaa

SEQ ID NO: 6468 - RNA, 19 nt, synthetic construct
  source 1..19: mol_type = other RNA
agctttctatcagaaagaa

SEQ ID NO: 6469 - RNA, 19 nt, synthetic construct
  source 1..19: mol_type = other RNA
cagctttctatcagaaaga

SEQ ID NO: 6470 - RNA, 19 nt, synthetic construct
  source 1..19: mol_type = other RNA
acagctttctatcagaaag

SEQ ID NO: 6471 - RNA, 19 nt, synthetic construct
  source 1..19: mol_type = other RNA
aacagctttctatcagaaa

SEQ ID NO: 6472 - RNA, 19 nt, synthetic construct
  source 1..19: mol_type = other RNA
aaacagctttctatcagaa

SEQ ID NO: 6473 - RNA, 19 nt, synthetic construct
  source 1..19: mol_type = other RNA
taaacagctttctatcaga

SEQ ID NO: 6474 - RNA, 19 nt, synthetic construct
  source 1..19: mol_type = other RNA
ttaaacagctttctatcag

SEQ ID NO: 6475 - RNA, 19 nt, synthetic construct
  source 1..19: mol_type = other RNA
tttaaacagctttctatca

SEQ ID NO: 6476 - RNA, 19 nt, synthetic construct
  source 1..19: mol_type = other RNA
gtttaaacagctttctatc

SEQ ID NO: 6477 - RNA, 19 nt, synthetic construct
  source 1..19: mol_type = other RNA
ggtttaaacagctttctat

SEQ ID NO: 6478 - RNA, 19 nt, synthetic construct
  source 1..19: mol_type = other RNA
aggtttaaacagctttcta

SEQ ID NO: 6479 - RNA, 19 nt, synthetic construct
  source 1..19: mol_type = other RNA
aaggtttaaacagctttct

SEQ ID NO: 6480 - RNA, 19 nt, synthetic construct
  source 1..19: mol_type = other RNA
gaaggtttaaacagctttc

SEQ ID NO: 6481 - RNA, 19 nt, synthetic construct
  source 1..19: mol_type = other RNA
agaaggtttaaacagcttt

SEQ ID NO: 6482 - RNA, 19 nt, synthetic construct
  source 1..19: mol_type = other RNA
cagaaggtttaaacagctt

SEQ ID NO: 6483 - RNA, 19 nt, synthetic construct
  source 1..19: mol_type = other RNA
tcagaaggtttaaacagct

SEQ ID NO: 6484 - RNA, 19 nt, synthetic construct
  source 1..19: mol_type = other RNA
atcagaaggtttaaacagc

SEQ ID NO: 6485 - RNA, 19 nt, synthetic construct
  source 1..19: mol_type = other RNA
tatcagaaggtttaaacag

SEQ ID NO: 6486 - RNA, 19 nt, synthetic construct
  source 1..19: mol_type = other RNA
atatcagaaggtttaaaca

SEQ ID NO: 6487 - RNA, 19 nt, synthetic construct
  source 1..19: mol_type = other RNA
gatatcagaaggtttaaac

SEQ ID NO: 6488 - RNA, 19 nt, synthetic construct
  source 1..19: mol_type = other RNA
cgatatcagaaggtttaaa

SEQ ID NO: 6489 - RNA, 19 nt, synthetic construct
  source 1..19: mol_type = other RNA
tcgatatcagaaggtttaa

SEQ ID NO: 6490 - RNA, 19 nt, synthetic construct
  source 1..19: mol_type = other RNA
ttcgatatcagaaggttta

SEQ ID NO: 6491 - RNA, 19 nt, synthetic construct
  source 1..19: mol_type = other RNA
tttcgatatcagaaggttt

SEQ ID NO: 6492 - RNA, 19 nt, synthetic construct
  source 1..19: mol_type = other RNA
ttttcgatatcagaaggtt

SEQ ID NO: 6493 - RNA, 19 nt, synthetic construct
  source 1..19: mol_type = other RNA
cttttcgatatcagaaggt

SEQ ID NO: 6494 - RNA, 19 nt, synthetic construct
  source 1..19: mol_type = other RNA
tcttttcgatatcagaagg

SEQ ID NO: 6495 - RNA, 19 nt, synthetic construct
  source 1..19: mol_type = other RNA
atcttttcgatatcagaag

SEQ ID NO: 6496 - RNA, 19 nt, synthetic construct
  source 1..19: mol_type = other RNA
aatcttttcgatatcagaa

SEQ ID NO: 6497 - RNA, 19 nt, synthetic construct
  source 1..19: mol_type = other RNA
aaatcttttcgatatcaga

SEQ ID NO: 6498 - RNA, 19 nt, synthetic construct
  source 1..19: mol_type = other RNA
aaaatcttttcgatatcag

SEQ ID NO: 6499 - RNA, 19 nt, synthetic construct
  source 1..19: mol_type = other RNA
aaaaatcttttcgatatca

SEQ ID NO: 6500 - RNA, 19 nt, synthetic construct
  source 1..19: mol_type = other RNA
taaaaatcttttcgatatc

SEQ ID NO: 6501 - RNA, 19 nt, synthetic construct
  source 1..19: mol_type = other RNA
ctaaaaatcttttcgatat

SEQ ID NO: 6502 - RNA, 19 nt, synthetic construct
  source 1..19: mol_type = other RNA
actaaaaatcttttcgata

SEQ ID NO: 6503 - RNA, 19 nt, synthetic construct
  source 1..19: mol_type = other RNA
tactaaaaatcttttcgat

SEQ ID NO: 6504 - RNA, 19 nt, synthetic construct
  source 1..19: mol_type = other RNA
ttactaaaaatcttttcga

SEQ ID NO: 6505 - RNA, 19 nt, synthetic construct
  source 1..19: mol_type = other RNA
gttactaaaaatcttttcg

SEQ ID NO: 6506 - RNA, 19 nt, synthetic construct
  source 1..19: mol_type = other RNA
tgttactaaaaatcttttc

SEQ ID NO: 6507 - RNA, 19 nt, synthetic construct
  source 1..19: mol_type = other RNA
atgttactaaaaatctttt

SEQ ID NO: 6508 - RNA, 19 nt, synthetic construct
  source 1..19: mol_type = other RNA
aatgttactaaaaatcttt

SEQ ID NO: 6509 - RNA, 19 nt, synthetic construct
  source 1..19: mol_type = other RNA
aaatgttactaaaaatctt

SEQ ID NO: 6510 - RNA, 19 nt, synthetic construct
  source 1..19: mol_type = other RNA
gaaatgttactaaaaatct

SEQ ID NO: 6511 - RNA, 19 nt, synthetic construct
  source 1..19: mol_type = other RNA
tgaaatgttactaaaaatc

SEQ ID NO: 6512 - RNA, 19 nt, synthetic construct
  source 1..19: mol_type = other RNA
ctgaaatgttactaaaaat

SEQ ID NO: 6513 - RNA, 19 nt, synthetic construct
  source 1..19: mol_type = other RNA
tctgaaatgttactaaaaa

SEQ ID NO: 6514 - RNA, 19 nt, synthetic construct
  source 1..19: mol_type = other RNA
atctgaaatgttactaaaa

SEQ ID NO: 6515 - RNA, 19 nt, synthetic construct
  source 1..19: mol_type = other RNA
tatctgaaatgttactaaa

SEQ ID NO: 6516 - RNA, 19 nt, synthetic construct
  source 1..19: mol_type = other RNA
atatctgaaatgttactaa

SEQ ID NO: 6517 - RNA, 19 nt, synthetic construct
  source 1..19: mol_type = other RNA
tatatctgaaatgttacta

SEQ ID NO: 6518 - RNA, 19 nt, synthetic construct
  source 1..19: mol_type = other RNA
gtatatctgaaatgttact

SEQ ID NO: 6519 - RNA, 19 nt, synthetic construct
  source 1..19: mol_type = other RNA
tgtatatctgaaatgttac

SEQ ID NO: 6520 - RNA, 19 nt, synthetic construct
  source 1..19: mol_type = other RNA
atgtatatctgaaatgtta

SEQ ID NO: 6521 - RNA, 19 nt, synthetic construct
  source 1..19: mol_type = other RNA
catgtatatctgaaatgtt

SEQ ID NO: 6522 - RNA, 19 nt, synthetic construct
  source 1..19: mol_type = other RNA
tcatgtatatctgaaatgt

SEQ ID NO: 6523 - RNA, 19 nt, synthetic construct
  source 1..19: mol_type = other RNA
ttcatgtatatctgaaatg

SEQ ID NO: 6524 - RNA, 19 nt, synthetic construct
  source 1..19: mol_type = other RNA
attcatgtatatctgaaat

SEQ ID NO: 6525 - RNA, 19 nt, synthetic construct
  source 1..19: mol_type = other RNA
aattcatgtatatctgaaa

SEQ ID NO: 6526 - RNA, 19 nt, synthetic construct
  source 1..19: mol_type = other RNA
caattcatgtatatctgaa

SEQ ID NO: 6527 - RNA, 19 nt, synthetic construct
  source 1..19: mol_type = other RNA
tcaattcatgtatatctga

SEQ ID NO: 6528 - RNA, 19 nt, synthetic construct
  source 1..19: mol_type = other RNA
gtcaattcatgtatatctg

SEQ ID NO: 6529 - RNA, 19 nt, synthetic construct
  source 1..19: mol_type = other RNA
agtcaattcatgtatatct

SEQ ID NO: 6530 - RNA, 19 nt, synthetic construct
  source 1..19: mol_type = other RNA
cagtcaattcatgtatatc

SEQ ID NO: 6531 - RNA, 19 nt, synthetic construct
  source 1..19: mol_type = other RNA
acagtcaattcatgtatat

SEQ ID NO: 6532 - RNA, 19 nt, synthetic construct
  source 1..19: mol_type = other RNA
cacagtcaattcatgtata

SEQ ID NO: 6533 - RNA, 19 nt, synthetic construct
  source 1..19: mol_type = other RNA
tcacagtcaattcatgtat

SEQ ID NO: 6534 - RNA, 19 nt, synthetic construct
  source 1..19: mol_type = other RNA
ttcacagtcaattcatgta

SEQ ID NO: 6535 - RNA, 19 nt, synthetic construct
  source 1..19: mol_type = other RNA
tttcacagtcaattcatgt

SEQ ID NO: 6536 - RNA, 19 nt, synthetic construct
  source 1..19: mol_type = other RNA
gtttcacagtcaattcatg

SEQ ID NO: 6537 - RNA, 19 nt, synthetic construct
  source 1..19: mol_type = other RNA
agtttcacagtcaattcat

SEQ ID NO: 6538 - RNA, 19 nt, synthetic construct
  source 1..19: mol_type = other RNA
aagtttcacagtcaattca

SEQ ID NO: 6539 - RNA, 19 nt, synthetic construct
  source 1..19: mol_type = other RNA
aaagtttcacagtcaattc

SEQ ID NO: 6540 - RNA, 19 nt, synthetic construct
  source 1..19: mol_type = other RNA
aaaagtttcacagtcaatt

SEQ ID NO: 6541 - RNA, 19 nt, synthetic construct
  source 1..19: mol_type = other RNA
taaaagtttcacagtcaat

SEQ ID NO: 6542 - RNA, 19 nt, synthetic construct
  source 1..19: mol_type = other RNA
ctaaaagtttcacagtcaa

SEQ ID NO: 6543 - RNA, 19 nt, synthetic construct
  source 1..19: mol_type = other RNA
cctaaaagtttcacagtca

SEQ ID NO: 6544 - RNA, 19 nt, synthetic construct
  source 1..19: mol_type = other RNA
acctaaaagtttcacagtc

SEQ ID NO: 6545 - RNA, 19 nt, synthetic construct
  source 1..19: mol_type = other RNA
aacctaaaagtttcacagt

SEQ ID NO: 6546 - RNA, 19 nt, synthetic construct
  source 1..19: mol_type = other RNA
aaacctaaaagtttcacag

SEQ ID NO: 6547 - RNA, 19 nt, synthetic construct
  source 1..19: mol_type = other RNA
caaacctaaaagtttcaca

SEQ ID NO: 6548 - RNA, 19 nt, synthetic construct
  source 1..19: mol_type = other RNA
tcaaacctaaaagtttcac

SEQ ID NO: 6549 - RNA, 19 nt, synthetic construct
  source 1..19: mol_type = other RNA
atcaaacctaaaagtttca

SEQ ID NO: 6550 - RNA, 19 nt, synthetic construct
  source 1..19: mol_type = other RNA
aatcaaacctaaaagtttc

SEQ ID NO: 6551 - RNA, 19 nt, synthetic construct
  source 1..19: mol_type = other RNA
caatcaaacctaaaagttt

SEQ ID NO: 6552 - RNA, 19 nt, synthetic construct
  source 1..19: mol_type = other RNA
tcaatcaaacctaaaagtt

SEQ ID NO: 6553 - RNA, 19 nt, synthetic construct
  source 1..19: mol_type = other RNA
ttcaatcaaacctaaaagt

SEQ ID NO: 6554 - RNA, 19 nt, synthetic construct
  source 1..19: mol_type = other RNA
cttcaatcaaacctaaaag

SEQ ID NO: 6555 - RNA, 19 nt, synthetic construct
  source 1..19: mol_type = other RNA
tcttcaatcaaacctaaaa

SEQ ID NO: 6556 - RNA, 19 nt, synthetic construct
  source 1..19: mol_type = other RNA
gtcttcaatcaaacctaaa

SEQ ID NO: 6557 - RNA, 19 nt, synthetic construct
  source 1..19: mol_type = other RNA
tgtcttcaatcaaacctaa

SEQ ID NO: 6558 - RNA, 19 nt, synthetic construct
  source 1..19: mol_type = other RNA
gtgtcttcaatcaaaccta

SEQ ID NO: 6559 - RNA, 19 nt, synthetic construct
  source 1..19: mol_type = other RNA
tgtgtcttcaatcaaacct

SEQ ID NO: 6560 - RNA, 19 nt, synthetic construct
  source 1..19: mol_type = other RNA
ctgtgtcttcaatcaaacc

SEQ ID NO: 6561 - RNA, 19 nt, synthetic construct
  source 1..19: mol_type = other RNA
actgtgtcttcaatcaaac

SEQ ID NO: 6562 - RNA, 19 nt, synthetic construct
  source 1..19: mol_type = other RNA
aactgtgtcttcaatcaaa

SEQ ID NO: 6563 - RNA, 19 nt, synthetic construct
  source 1..19: mol_type = other RNA
caactgtgtcttcaatcaa

SEQ ID NO: 6564 - RNA, 19 nt, synthetic construct
  source 1..19: mol_type = other RNA
tcaactgtgtcttcaatca

SEQ ID NO: 6565 - RNA, 19 nt, synthetic construct
  source 1..19: mol_type = other RNA
ttcaactgtgtcttcaatc

SEQ ID NO: 6566 - RNA, 19 nt, synthetic construct
  source 1..19: mol_type = other RNA
tttcaactgtgtcttcaat

SEQ ID NO: 6567 - RNA, 19 nt, synthetic construct
  source 1..19: mol_type = other RNA
atttcaactgtgtcttcaa

SEQ ID NO: 6568 - RNA, 19 nt, synthetic construct
  source 1..19: mol_type = other RNA
catttcaactgtgtcttca

SEQ ID NO: 6569 - RNA, 19 nt, synthetic construct
  source 1..19: mol_type = other RNA
tcatttcaactgtgtcttc

SEQ ID NO: 6570 - RNA, 19 nt, synthetic construct
  source 1..19: mol_type = other RNA
gtcatttcaactgtgtctt

SEQ ID NO: 6571 - RNA, 19 nt, synthetic construct
  source 1..19: mol_type = other RNA
agtcatttcaactgtgtct

SEQ ID NO: 6572 - RNA, 19 nt, synthetic construct
  source 1..19: mol_type = other RNA
cagtcatttcaactgtgtc

SEQ ID NO: 6573 - RNA, 19 nt, synthetic construct
  source 1..19: mol_type = other RNA
tcagtcatttcaactgtgt

SEQ ID NO: 6574 - RNA, 19 nt, synthetic construct
  source 1..19: mol_type = other RNA
atcagtcatttcaactgtg

SEQ ID NO: 6575 - RNA, 19 nt, synthetic construct
  source 1..19: mol_type = other RNA
catcagtcatttcaactgt

SEQ ID NO: 6576 - RNA, 19 nt, synthetic construct
  source 1..19: mol_type = other RNA
tcatcagtcatttcaactg

SEQ ID NO: 6577 - RNA, 19 nt, synthetic construct
  source 1..19: mol_type = other RNA
ttcatcagtcatttcaact

SEQ ID NO: 6578 - RNA, 19 nt, synthetic construct
  source 1..19: mol_type = other RNA
tttcatcagtcatttcaac

SEQ ID NO: 6579 - RNA, 19 nt, synthetic construct
  source 1..19: mol_type = other RNA
ctttcatcagtcatttcaa

SEQ ID NO: 6580 - RNA, 19 nt, synthetic construct
  source 1..19: mol_type = other RNA
gctttcatcagtcatttca

SEQ ID NO: 6581 - RNA, 19 nt, synthetic construct
  source 1..19: mol_type = other RNA
tgctttcatcagtcatttc

SEQ ID NO: 6582 - RNA, 19 nt, synthetic construct
  source 1..19: mol_type = other RNA
ctgctttcatcagtcattt

SEQ ID NO: 6583 - RNA, 19 nt, synthetic construct
  source 1..19: mol_type = other RNA
actgctttcatcagtcatt

SEQ ID NO: 6584 - RNA, 19 nt, synthetic construct
  source 1..19: mol_type = other RNA
gactgctttcatcagtcat

SEQ ID NO: 6585 - RNA, 19 nt, synthetic construct
  source 1..19: mol_type = other RNA
ggactgctttcatcagtca

SEQ ID NO: 6586 - RNA, 19 nt, synthetic construct
  source 1..19: mol_type = other RNA
aggactgctttcatcagtc

SEQ ID NO: 6587 - RNA, 19 nt, synthetic construct
  source 1..19: mol_type = other RNA
gaggactgctttcatcagt

SEQ ID NO: 6588 - RNA, 19 nt, synthetic construct
  source 1..19: mol_type = other RNA
tgaggactgctttcatcag

SEQ ID NO: 6589 - RNA, 19 nt, synthetic construct
  source 1..19: mol_type = other RNA
atgaggactgctttcatca

SEQ ID NO: 6590 - RNA, 19 nt, synthetic construct
  source 1..19: mol_type = other RNA
gatgaggactgctttcatc

SEQ ID NO: 6591 - RNA, 19 nt, synthetic construct
  source 1..19: mol_type = other RNA
ggatgaggactgctttcat

SEQ ID NO: 6592 - RNA, 19 nt, synthetic construct
  source 1..19: mol_type = other RNA
gggatgaggactgctttca

SEQ ID NO: 6593 - RNA, 19 nt, synthetic construct
  source 1..19: mol_type = other RNA
agggatgaggactgctttc

SEQ ID NO: 6594 - RNA, 19 nt, synthetic construct
  source 1..19: mol_type = other RNA
aagggatgaggactgcttt

SEQ ID NO: 6595 - RNA, 19 nt, synthetic construct
  source 1..19: mol_type = other RNA
taagggatgaggactgctt

SEQ ID NO: 6596 - RNA, 19 nt, synthetic construct
  source 1..19: mol_type = other RNA
ctaagggatgaggactgct

SEQ ID NO: 6597 - RNA, 19 nt, synthetic construct
  source 1..19: mol_type = other RNA
gctaagggatgaggactgc

SEQ ID NO: 6598 - RNA, 19 nt, synthetic construct
  source 1..19: mol_type = other RNA
agctaagggatgaggactg

SEQ ID NO: 6599 - RNA, 19 nt, synthetic construct
  source 1..19: mol_type = other RNA
cagctaagggatgaggact

SEQ ID NO: 6600 - RNA, 19 nt, synthetic construct
  source 1..19: mol_type = other RNA
ccagctaagggatgaggac

SEQ ID NO: 6601 - RNA, 19 nt, synthetic construct
  source 1..19: mol_type = other RNA
gccagctaagggatgagga

SEQ ID NO: 6602 - RNA, 19 nt, synthetic construct
  source 1..19: mol_type = other RNA
tgccagctaagggatgagg

SEQ ID NO: 6603 - RNA, 19 nt, synthetic construct
  source 1..19: mol_type = other RNA
ctgccagctaagggatgag

SEQ ID NO: 6604 - RNA, 19 nt, synthetic construct
  source 1..19: mol_type = other RNA
gctgccagctaagggatga

SEQ ID NO: 6605 - RNA, 19 nt, synthetic construct
  source 1..19: mol_type = other RNA
agctgccagctaagggatg

SEQ ID NO: 6606 - RNA, 19 nt, synthetic construct
  source 1..19: mol_type = other RNA
cagctgccagctaagggat

SEQ ID NO: 6607 - RNA, 19 nt, synthetic construct
  source 1..19: mol_type = other RNA
acagctgccagctaaggga

SEQ ID NO: 6608 - RNA, 19 nt, synthetic construct
  source 1..19: mol_type = other RNA
aacagctgccagctaaggg

SEQ ID NO: 6609 - RNA, 19 nt, synthetic construct
  source 1..19: mol_type = other RNA
aaacagctgccagctaagg

SEQ ID NO: 6610 - RNA, 19 nt, synthetic construct
  source 1..19: mol_type = other RNA
aaaacagctgccagctaag

SEQ ID NO: 6611 - RNA, 19 nt, synthetic construct
  source 1..19: mol_type = other RNA
caaaacagctgccagctaa

SEQ ID NO: 6612 - RNA, 19 nt, synthetic construct
  source 1..19: mol_type = other RNA
tcaaaacagctgccagcta

SEQ ID NO: 6613 - RNA, 19 nt, synthetic construct
  source 1..19: mol_type = other RNA
ttcaaaacagctgccagct

SEQ ID NO: 6614 - RNA, 19 nt, synthetic construct
  source 1..19: mol_type = other RNA
cttcaaaacagctgccagc

SEQ ID NO: 6615 - RNA, 19 nt, synthetic construct
  source 1..19: mol_type = other RNA
tcttcaaaacagctgccag

SEQ ID NO: 6616 - RNA, 19 nt, synthetic construct
  source 1..19: mol_type = other RNA
atcttcaaaacagctgcca

SEQ ID NO: 6617 - RNA, 19 nt, synthetic construct
  source 1..19: mol_type = other RNA
aatcttcaaaacagctgcc

SEQ ID NO: 6618 - RNA, 19 nt, synthetic construct
  source 1..19: mol_type = other RNA
aaatcttcaaaacagctgc

SEQ ID NO: 6619 - RNA, 19 nt, synthetic construct
  source 1..19: mol_type = other RNA
caaatcttcaaaacagctg

SEQ ID NO: 6620 - RNA, 19 nt, synthetic construct
  source 1..19: mol_type = other RNA
ccaaatcttcaaaacagct

SEQ ID NO: 6621 - RNA, 19 nt, synthetic construct
  source 1..19: mol_type = other RNA
gccaaatcttcaaaacagc

SEQ ID NO: 6622 - RNA, 19 nt, synthetic construct
  source 1..19: mol_type = other RNA
tgccaaatcttcaaaacag

SEQ ID NO: 6623 - RNA, 19 nt, synthetic construct
  source 1..19: mol_type = other RNA
ctgccaaatcttcaaaaca

SEQ ID NO: 6624 - RNA, 19 nt, synthetic construct
  source 1..19: mol_type = other RNA
tctgccaaatcttcaaaac

SEQ ID NO: 6625 - RNA, 19 nt, synthetic construct
  source 1..19: mol_type = other RNA
ttctgccaaatcttcaaaa

SEQ ID NO: 6626 - RNA, 19 nt, synthetic construct
  source 1..19: mol_type = other RNA
cttctgccaaatcttcaaa

SEQ ID NO: 6627 - RNA, 19 nt, synthetic construct
  source 1..19: mol_type = other RNA
tcttctgccaaatcttcaa

SEQ ID NO: 6628 - RNA, 19 nt, synthetic construct
  source 1..19: mol_type = other RNA
ctcttctgccaaatcttca

SEQ ID NO: 6629 - RNA, 19 nt, synthetic construct
  source 1..19: mol_type = other RNA
gctcttctgccaaatcttc

SEQ ID NO: 6630 - RNA, 19 nt, synthetic construct
  source 1..19: mol_type = other RNA
tgctcttctgccaaatctt

SEQ ID NO: 6631 - RNA, 19 nt, synthetic construct
  source 1..19: mol_type = other RNA
ttgctcttctgccaaatct

SEQ ID NO: 6632 - RNA, 19 nt, synthetic construct
  source 1..19: mol_type = other RNA
cttgctcttctgccaaatc

SEQ ID NO: 6633 - RNA, 19 nt, synthetic construct
  source 1..19: mol_type = other RNA
gcttgctcttctgccaaat

SEQ ID NO: 6634 - RNA, 19 nt, synthetic construct
  source 1..19: mol_type = other RNA
tgcttgctcttctgccaaa

SEQ ID NO: 6635 - RNA, 19 nt, synthetic construct
  source 1..19: mol_type = other RNA
atgcttgctcttctgccaa

SEQ ID NO: 6636 - RNA, 19 nt, synthetic construct
  source 1..19: mol_type = other RNA
aatgcttgctcttctgcca

SEQ ID NO: 6637 - RNA, 19 nt, synthetic construct
  source 1..19: mol_type = other RNA
aaatgcttgctcttctgcc

SEQ ID NO: 6638 - RNA, 19 nt, synthetic construct
  source 1..19: mol_type = other RNA
caaatgcttgctcttctgc

SEQ ID NO: 6639 - RNA, 19 nt, synthetic construct
  source 1..19: mol_type = other RNA
tcaaatgcttgctcttctg

SEQ ID NO: 6640 - RNA, 19 nt, synthetic construct
  source 1..19: mol_type = other RNA
atcaaatgcttgctcttct

SEQ ID NO: 6641 - RNA, 19 nt, synthetic construct
  source 1..19: mol_type = other RNA
gatcaaatgcttgctcttc

SEQ ID NO: 6642 - RNA, 19 nt, synthetic construct
  source 1..19: mol_type = other RNA
ggatcaaatgcttgctctt

SEQ ID NO: 6643 - RNA, 19 nt, synthetic construct
  source 1..19: mol_type = other RNA
aggatcaaatgcttgctct

SEQ ID NO: 6644 - RNA, 19 nt, synthetic construct
  source 1..19: mol_type = other RNA
aaggatcaaatgcttgctc

SEQ ID NO: 6645 - RNA, 19 nt, synthetic construct
  source 1..19: mol_type = other RNA
taaggatcaaatgcttgct

SEQ ID NO: 6646 - RNA, 19 nt, synthetic construct
  source 1..19: mol_type = other RNA
ataaggatcaaatgcttgc

SEQ ID NO: 6647 - RNA, 19 nt, synthetic construct
  source 1..19: mol_type = other RNA
cataaggatcaaatgcttg

SEQ ID NO: 6648 - RNA, 19 nt, synthetic construct
  source 1..19: mol_type = other RNA
tcataaggatcaaatgctt

SEQ ID NO: 6649 - RNA, 19 nt, synthetic construct
  source 1..19: mol_type = other RNA
ttcataaggatcaaatgct

SEQ ID NO: 6650 - RNA, 19 nt, synthetic construct
  source 1..19: mol_type = other RNA
tttcataaggatcaaatgc

SEQ ID NO: 6651 - RNA, 19 nt, synthetic construct
  source 1..19: mol_type = other RNA
gtttcataaggatcaaatg

SEQ ID NO: 6652 - RNA, 19 nt, synthetic construct
  source 1..19: mol_type = other RNA
tgtttcataaggatcaaat

SEQ ID NO: 6653 - RNA, 19 nt, synthetic construct
  source 1..19: mol_type = other RNA
atgtttcataaggatcaaa

SEQ ID NO: 6654 - RNA, 19 nt, synthetic construct
  source 1..19: mol_type = other RNA
aatgtttcataaggatcaa

SEQ ID NO: 6655 - RNA, 19 nt, synthetic construct
  source 1..19: mol_type = other RNA
taatgtttcataaggatca

SEQ ID NO: 6656 - RNA, 19 nt, synthetic construct
  source 1..19: mol_type = other RNA
ataatgtttcataaggatc

SEQ ID NO: 6657 - RNA, 19 nt, synthetic construct
  source 1..19: mol_type = other RNA
gataatgtttcataaggat

SEQ ID NO: 6658 - RNA, 19 nt, synthetic construct
  source 1..19: mol_type = other RNA
tgataatgtttcataagga

SEQ ID NO: 6659 - RNA, 19 nt, synthetic construct
  source 1..19: mol_type = other RNA
gtgataatgtttcataagg

SEQ ID NO: 6660 - RNA, 19 nt, synthetic construct
  source 1..19: mol_type = other RNA
tgtgataatgtttcataag

SEQ ID NO: 6661 - RNA, 19 nt, synthetic construct
  source 1..19: mol_type = other RNA
ctgtgataatgtttcataa

SEQ ID NO: 6662 - RNA, 19 nt, synthetic construct
  source 1..19: mol_type = other RNA
cctgtgataatgtttcata

SEQ ID NO: 6663 - RNA, 19 nt, synthetic construct
  source 1..19: mol_type = other RNA
tcctgtgataatgtttcat

SEQ ID NO: 6664 - RNA, 19 nt, synthetic construct
  source 1..19: mol_type = other RNA
gtcctgtgataatgtttca

SEQ ID NO: 6665 - RNA, 19 nt, synthetic construct
  source 1..19: mol_type = other RNA
tgtcctgtgataatgtttc

SEQ ID NO: 6666 - RNA, 19 nt, synthetic construct
  source 1..19: mol_type = other RNA
atgtcctgtgataatgttt

SEQ ID NO: 6667 - RNA, 19 nt, synthetic construct
  source 1..19: mol_type = other RNA
aatgtcctgtgataatgtt

SEQ ID NO: 6668 - RNA, 19 nt, synthetic construct
  source 1..19: mol_type = other RNA
gaatgtcctgtgataatgt

SEQ ID NO: 6669 - RNA, 19 nt, synthetic construct
  source 1..19: mol_type = other RNA
agaatgtcctgtgataatg

SEQ ID NO: 6670 - RNA, 19 nt, synthetic construct
  source 1..19: mol_type = other RNA
aagaatgtcctgtgataat

SEQ ID NO: 6671 - RNA, 19 nt, synthetic construct
  source 1..19: mol_type = other RNA
aaagaatgtcctgtgataa

SEQ ID NO: 6672 - RNA, 19 nt, synthetic construct
  source 1..19: mol_type = other RNA
gaaagaatgtcctgtgata

SEQ ID NO: 6673 - RNA, 19 nt, synthetic construct
  source 1..19: mol_type = other RNA
tgaaagaatgtcctgtgat

SEQ ID NO: 6674 - RNA, 19 nt, synthetic construct
  source 1..19: mol_type = other RNA
gtgaaagaatgtcctgtga

SEQ ID NO: 6675 - RNA, 19 nt, synthetic construct
  source 1..19: mol_type = other RNA
ggtgaaagaatgtcctgtg

SEQ ID NO: 6676 - RNA, 19 nt, synthetic construct
  source 1..19: mol_type = other RNA
tggtgaaagaatgtcctgt

SEQ ID NO: 6677 - RNA, 19 nt, synthetic construct
  source 1..19: mol_type = other RNA
ctggtgaaagaatgtcctg

SEQ ID NO: 6678 - RNA, 19 nt, synthetic construct
  source 1..19: mol_type = other RNA
tctggtgaaagaatgtcct

SEQ ID NO: 6679 - RNA, 19 nt, synthetic construct
  source 1..19: mol_type = other RNA
ctctggtgaaagaatgtcc

SEQ ID NO: 6680 - RNA, 19 nt, synthetic construct
  source 1..19: mol_type = other RNA
actctggtgaaagaatgtc

SEQ ID NO: 6681 - RNA, 19 nt, synthetic construct
  source 1..19: mol_type = other RNA
aactctggtgaaagaatgt

SEQ ID NO: 6682 - RNA, 19 nt, synthetic construct
  source 1..19: mol_type = other RNA
aaactctggtgaaagaatg

SEQ ID NO: 6683 - RNA, 19 nt, synthetic construct
  source 1..19: mol_type = other RNA
gaaactctggtgaaagaat

SEQ ID NO: 6684 - RNA, 19 nt, synthetic construct
  source 1..19: mol_type = other RNA
tgaaactctggtgaaagaa

SEQ ID NO: 6685 - RNA, 19 nt, synthetic construct
  source 1..19: mol_type = other RNA
atgaaactctggtgaaaga

SEQ ID NO: 6686 - RNA, 19 nt, synthetic construct
  source 1..19: mol_type = other RNA
catgaaactctggtgaaag

SEQ ID NO: 6687 - RNA, 19 nt, synthetic construct
  source 1..19: mol_type = other RNA
tcatgaaactctggtgaaa

SEQ ID NO: 6688 - RNA, 19 nt, synthetic construct
  source 1..19: mol_type = other RNA
ttcatgaaactctggtgaa

SEQ ID NO: 6689 - RNA, 19 nt, synthetic construct
  source 1..19: mol_type = other RNA
gttcatgaaactctggtga

SEQ ID NO: 6690 - RNA, 19 nt, synthetic construct
  source 1..19: mol_type = other RNA
tgttcatgaaactctggtg

SEQ ID NO: 6691 - RNA, 19 nt, synthetic construct
  source 1..19: mol_type = other RNA
atgttcatgaaactctggt

SEQ ID NO: 6692 - RNA, 19 nt, synthetic construct
  source 1..19: mol_type = other RNA
aatgttcatgaaactctgg

SEQ ID NO: 6693 - RNA, 19 nt, synthetic construct
  source 1..19: mol_type = other RNA
aaatgttcatgaaactctg

SEQ ID NO: 6694 - RNA, 19 nt, synthetic construct
  source 1..19: mol_type = other RNA
gaaatgttcatgaaactct

SEQ ID NO: 6695 - RNA, 19 nt, synthetic construct
  source 1..19: mol_type = other RNA
tgaaatgttcatgaaactc

SEQ ID NO: 6696 - RNA, 19 nt, synthetic construct
  source 1..19: mol_type = other RNA
ttgaaatgttcatgaaact

SEQ ID NO: 6697 - RNA, 19 nt, synthetic construct
  source 1..19: mol_type = other RNA
attgaaatgttcatgaaac

SEQ ID NO: 6698 - RNA, 19 nt, synthetic construct
  source 1..19: mol_type = other RNA
tattgaaatgttcatgaaa

SEQ ID NO: 6699 - RNA, 19 nt, synthetic construct
  source 1..19: mol_type = other RNA
ttattgaaatgttcatgaa

SEQ ID NO: 6700 - RNA, 19 nt, synthetic construct
  source 1..19: mol_type = other RNA
tttattgaaatgttcatga

SEQ ID NO: 6701 - RNA, 19 nt, synthetic construct
  source 1..19: mol_type = other RNA
atttattgaaatgttcatg

SEQ ID NO: 6702 - RNA, 19 nt, synthetic construct
  source 1..19: mol_type = other RNA
aatttattgaaatgttcat

SEQ ID NO: 6703 - RNA, 19 nt, synthetic construct
  source 1..19: mol_type = other RNA
caatttattgaaatgttca

SEQ ID NO: 6704 - RNA, 19 nt, synthetic construct
  source 1..19: mol_type = other RNA
tcaatttattgaaatgttc

SEQ ID NO: 6705 - RNA, 19 nt, synthetic construct
  source 1..19: mol_type = other RNA
atcaatttattgaaatgtt

SEQ ID NO: 6706 - RNA, 19 nt, synthetic construct
  source 1..19: mol_type = other RNA
catcaatttattgaaatgt

SEQ ID NO: 6707 - RNA, 19 nt, synthetic construct
  source 1..19: mol_type = other RNA
ccatcaatttattgaaatg

SEQ ID NO: 6708 - RNA, 19 nt, synthetic construct
  source 1..19: mol_type = other RNA
gccatcaatttattgaaat

SEQ ID NO: 6709 - RNA, 19 nt, synthetic construct
  source 1..19: mol_type = other RNA
ggccatcaatttattgaaa

SEQ ID NO: 6710 - RNA, 19 nt, synthetic construct
  source 1..19: mol_type = other RNA
tggccatcaatttattgaa

SEQ ID NO: 6711 - RNA, 19 nt, synthetic construct
  source 1..19: mol_type = other RNA
ctggccatcaatttattga

SEQ ID NO: 6712 - RNA, 19 nt, synthetic construct
  source 1..19: mol_type = other RNA
tctggccatcaatttattg

SEQ ID NO: 6713 - RNA, 19 nt, synthetic construct
  source 1..19: mol_type = other RNA
gtctggccatcaatttatt

SEQ ID NO: 6714 - RNA, 19 nt, synthetic construct
  source 1..19: mol_type = other RNA
ggtctggccatcaatttat

SEQ ID NO: 6715 - RNA, 19 nt, synthetic construct
  source 1..19: mol_type = other RNA
aggtctggccatcaattta

SEQ ID NO: 6716 - RNA, 19 nt, synthetic construct
  source 1..19: mol_type = other RNA
caggtctggccatcaattt

SEQ ID NO: 6717 - RNA, 19 nt, synthetic construct
  source 1..19: mol_type = other RNA
gcaggtctggccatcaatt

SEQ ID NO: 6718 - RNA, 19 nt, synthetic construct
  source 1..19: mol_type = other RNA
tgcaggtctggccatcaat

SEQ ID NO: 6719 - RNA, 19 nt, synthetic construct
  source 1..19: mol_type = other RNA
ctgcaggtctggccatcaa

SEQ ID NO: 6720 - RNA, 19 nt, synthetic construct
  source 1..19: mol_type = other RNA
actgcaggtctggccatca

SEQ ID NO: 6721 - RNA, 19 nt, synthetic construct
  source 1..19: mol_type = other RNA
aactgcaggtctggccatc

SEQ ID NO: 6722 - RNA, 19 nt, synthetic construct
  source 1..19: mol_type = other RNA
caactgcaggtctggccat

SEQ ID NO: 6723 - RNA, 19 nt, synthetic construct
  source 1..19: mol_type = other RNA
gcaactgcaggtctggcca

SEQ ID NO: 6724 - RNA, 19 nt, synthetic construct
  source 1..19: mol_type = other RNA
agcaactgcaggtctggcc

SEQ ID NO: 6725 - RNA, 19 nt, synthetic construct
  source 1..19: mol_type = other RNA
gagcaactgcaggtctggc

SEQ ID NO: 6726 - RNA, 19 nt, synthetic construct
  source 1..19: mol_type = other RNA
agagcaactgcaggtctgg

SEQ ID NO: 6727 - RNA, 19 nt, synthetic construct
  source 1..19: mol_type = other RNA
tagagcaactgcaggtctg

SEQ ID NO: 6728 - RNA, 19 nt, synthetic construct
  source 1..19: mol_type = other RNA
gtagagcaactgcaggtct

SEQ ID NO: 6729 - RNA, 19 nt, synthetic construct
  source 1..19: mol_type = other RNA
tgtagagcaactgcaggtc

SEQ ID NO: 6730 - RNA, 19 nt, synthetic construct
  source 1..19: mol_type = other RNA
gtgtagagcaactgcaggt

SEQ ID NO: 6731 - RNA, 19 nt, synthetic construct
  source 1..19: mol_type = other RNA
agtgtagagcaactgcagg

SEQ ID NO: 6732 - RNA, 19 nt, synthetic construct
  source 1..19: mol_type = other RNA
aagtgtagagcaactgcag

SEQ ID NO: 6733 - RNA, 19 nt, synthetic construct
  source 1..19: mol_type = other RNA
aaagtgtagagcaactgca

SEQ ID NO: 6734 - RNA, 19 nt, synthetic construct
  source 1..19: mol_type = other RNA
gaaagtgtagagcaactgc

SEQ ID NO: 6735 - RNA, 19 nt, synthetic construct
  source 1..19: mol_type = other RNA
tgaaagtgtagagcaactg

SEQ ID NO: 6736 - RNA, 19 nt, synthetic construct
  source 1..19: mol_type = other RNA
ctgaaagtgtagagcaact

SEQ ID NO: 6737 - RNA, 19 nt, synthetic construct
  source 1..19: mol_type = other RNA
actgaaagtgtagagcaac

SEQ ID NO: 6738 - RNA, 19 nt, synthetic construct
  source 1..19: mol_type = other RNA
gactgaaagtgtagagcaa

SEQ ID NO: 6739 - RNA, 19 nt, synthetic construct
  source 1..19: mol_type = other RNA
ggactgaaagtgtagagca

SEQ ID NO: 6740 - RNA, 19 nt, synthetic construct
  source 1..19: mol_type = other RNA
tggactgaaagtgtagagc

SEQ ID NO: 6741 - RNA, 19 nt, synthetic construct
  source 1..19: mol_type = other RNA
atggactgaaagtgtagag

SEQ ID NO: 6742 - RNA, 19 nt, synthetic construct
  source 1..19: mol_type = other RNA
aatggactgaaagtgtaga

SEQ ID NO: 6743 - RNA, 19 nt, synthetic construct
  source 1..19: mol_type = other RNA
caatggactgaaagtgtag

SEQ ID NO: 6744 - RNA, 19 nt, synthetic construct
  source 1..19: mol_type = other RNA
gcaatggactgaaagtgta

SEQ ID NO: 6745 - RNA, 19 nt, synthetic construct
  source 1..19: mol_type = other RNA
agcaatggactgaaagtgt

SEQ ID NO: 6746 - RNA, 19 nt, synthetic construct
  source 1..19: mol_type = other RNA
cagcaatggactgaaagtg

SEQ ID NO: 6747 - RNA, 19 nt, synthetic construct
  source 1..19: mol_type = other RNA
tcagcaatggactgaaagt

SEQ ID NO: 6748 - RNA, 19 nt, synthetic construct
  source 1..19: mol_type = other RNA
atcagcaatggactgaaag

SEQ ID NO: 6749 - RNA, 19 nt, synthetic construct
  source 1..19: mol_type = other RNA
catcagcaatggactgaaa

SEQ ID NO: 6750 - RNA, 19 nt, synthetic construct
  source 1..19: mol_type = other RNA
ccatcagcaatggactgaa

SEQ ID NO: 6751 - RNA, 19 nt, synthetic construct
  source 1..19: mol_type = other RNA
accatcagcaatggactga

SEQ ID NO: 6752 - RNA, 19 nt, synthetic construct
  source 1..19: mol_type = other RNA
aaccatcagcaatggactg

SEQ ID NO: 6753 - RNA, 19 nt, synthetic construct
  source 1..19: mol_type = other RNA
aaaccatcagcaatggact

SEQ ID NO: 6754 - RNA, 19 nt, synthetic construct
  source 1..19: mol_type = other RNA
aaaaccatcagcaatggac

SEQ ID NO: 6755 - RNA, 19 nt, synthetic construct
  source 1..19: mol_type = other RNA
taaaaccatcagcaatgga

SEQ ID NO: 6756 - RNA, 19 nt, synthetic construct
  source 1..19: mol_type = other RNA
ttaaaaccatcagcaatgg

SEQ ID NO: 6757 - RNA, 19 nt, synthetic construct
  source 1..19: mol_type = other RNA
tttaaaaccatcagcaatg

SEQ ID NO: 6758 - RNA, 19 nt, synthetic construct
  source 1..19: mol_type = other RNA
ctttaaaaccatcagcaat

SEQ ID NO: 6759 - RNA, 19 nt, synthetic construct
  source 1..19: mol_type = other RNA
tctttaaaaccatcagcaa

SEQ ID NO: 6760 - RNA, 19 nt, synthetic construct
  source 1..19: mol_type = other RNA
ctctttaaaaccatcagca

SEQ ID NO: 6761 - RNA, 19 nt, synthetic construct
  source 1..19: mol_type = other RNA
cctctttaaaaccatcagc

SEQ ID NO: 6762 - RNA, 19 nt, synthetic construct
  source 1..19: mol_type = other RNA
gcctctttaaaaccatcag

SEQ ID NO: 6763 - RNA, 19 nt, synthetic construct
  source 1..19: mol_type = other RNA
tgcctctttaaaaccatca

SEQ ID NO: 6764 - RNA, 19 nt, synthetic construct
  source 1..19: mol_type = other RNA
ctgcctctttaaaaccatc

SEQ ID NO: 6765 - RNA, 19 nt, synthetic construct
  source 1..19: mol_type = other RNA
actgcctctttaaaaccat

SEQ ID NO: 6766 - RNA, 19 nt, synthetic construct
  source 1..19: mol_type = other RNA
aactgcctctttaaaacca

SEQ ID NO: 6767 - RNA, 19 nt, synthetic construct
  source 1..19: mol_type = other RNA
gaactgcctctttaaaacc

SEQ ID NO: 6768 - RNA, 19 nt, synthetic construct
  source 1..19: mol_type = other RNA
cgaactgcctctttaaaac

SEQ ID NO: 6769 - RNA, 19 nt, synthetic construct
  source 1..19: mol_type = other RNA
acgaactgcctctttaaaa

SEQ ID NO: 6770 - RNA, 19 nt, synthetic construct
  source 1..19: mol_type = other RNA
aacgaactgcctctttaaa

SEQ ID NO: 6771 - RNA, 19 nt, synthetic construct
  source 1..19: mol_type = other RNA
taacgaactgcctctttaa

SEQ ID NO: 6772 - RNA, 19 nt, synthetic construct
  source 1..19: mol_type = other RNA
ataacgaactgcctcttta

SEQ ID NO: 6773 - RNA, 19 nt, synthetic construct
  source 1..19: mol_type = other RNA
cataacgaactgcctcttt

SEQ ID NO: 6774 - RNA, 19 nt, synthetic construct
  source 1..19: mol_type = other RNA
acataacgaactgcctctt

SEQ ID NO: 6775 - RNA, 19 nt, synthetic construct
  source 1..19: mol_type = other RNA
gacataacgaactgcctct

SEQ ID NO: 6776 - RNA, 19 nt, synthetic construct
  source 1..19: mol_type = other RNA
ggacataacgaactgcctc

SEQ ID NO: 6777 - RNA, 19 nt, synthetic construct
  source 1..19: mol_type = other RNA
aggacataacgaactgcct

SEQ ID NO: 6778 - RNA, 19 nt, synthetic construct
  source 1..19: mol_type = other RNA
aaggacataacgaactgcc

SEQ ID NO: 6779 - RNA, 19 nt, synthetic construct
  source 1..19: mol_type = other RNA
gaaggacataacgaactgc

SEQ ID NO: 6780 - RNA, 19 nt, synthetic construct
  source 1..19: mol_type = other RNA
ggaaggacataacgaactg

SEQ ID NO: 6781 - RNA, 19 nt, synthetic construct
  source 1..19: mol_type = other RNA
tggaaggacataacgaact

SEQ ID NO: 6782 - RNA, 19 nt, synthetic construct
  source 1..19: mol_type = other RNA
gtggaaggacataacgaac

SEQ ID NO: 6783 - RNA, 19 nt, synthetic construct
  source 1..19: mol_type = other RNA
cgtggaaggacataacgaa

SEQ ID NO: 6784 - RNA, 19 nt, synthetic construct
  source 1..19: mol_type = other RNA
acgtggaaggacataacga

SEQ ID NO: 6785 - RNA, 19 nt, synthetic construct
  source 1..19: mol_type = other RNA
gacgtggaaggacataacg

SEQ ID NO: 6786 - RNA, 19 nt, synthetic construct
  source 1..19: mol_type = other RNA
agacgtggaaggacataac

SEQ ID NO: 6787 - RNA, 19 nt, synthetic construct
  source 1..19: mol_type = other RNA
aagacgtggaaggacataa

SEQ ID NO: 6788 - RNA, 19 nt, synthetic construct
  source 1..19: mol_type = other RNA
taagacgtggaaggacata

SEQ ID NO: 6789 - RNA, 19 nt, synthetic construct
  source 1..19: mol_type = other RNA
ataagacgtggaaggacat

SEQ ID NO: 6790 - RNA, 19 nt, synthetic construct
  source 1..19: mol_type = other RNA
cataagacgtggaaggaca

SEQ ID NO: 6791 - RNA, 19 nt, synthetic construct
  source 1..19: mol_type = other RNA
gcataagacgtggaaggac

SEQ ID NO: 6792 - RNA, 19 nt, synthetic construct
  source 1..19: mol_type = other RNA
agcataagacgtggaagga

SEQ ID NO: 6793 - RNA, 19 nt, synthetic construct
  source 1..19: mol_type = other RNA
cagcataagacgtggaagg

SEQ ID NO: 6794 - RNA, 19 nt, synthetic construct
  source 1..19: mol_type = other RNA
ccagcataagacgtggaag

SEQ ID NO: 6795 - RNA, 19 nt, synthetic construct
  source 1..19: mol_type = other RNA
accagcataagacgtggaa

SEQ ID NO: 6796 - RNA, 19 nt, synthetic construct
  source 1..19: mol_type = other RNA
caccagcataagacgtgga

SEQ ID NO: 6797 - RNA, 19 nt, synthetic construct
  source 1..19: mol_type = other RNA
gcaccagcataagacgtgg

SEQ ID NO: 6798 - RNA, 19 nt, synthetic construct
  source 1..19: mol_type = other RNA
ggcaccagcataagacgtg

SEQ ID NO: 6799 - RNA, 19 nt, synthetic construct
  source 1..19: mol_type = other RNA
tggcaccagcataagacgt

SEQ ID NO: 6800 - RNA, 19 nt, synthetic construct
  source 1..19: mol_type = other RNA
ctggcaccagcataagacg

SEQ ID NO: 6801 - RNA, 19 nt, synthetic construct
  source 1..19: mol_type = other RNA
actggcaccagcataagac

SEQ ID NO: 6802 - RNA, 19 nt, synthetic construct
  source 1..19: mol_type = other RNA
cactggcaccagcataaga

SEQ ID NO: 6803 - RNA, 19 nt, synthetic construct
  source 1..19: mol_type = other RNA
acactggcaccagcataag

SEQ ID NO: 6804 - RNA, 19 nt, synthetic construct
  source 1..19: mol_type = other RNA
tacactggcaccagcataa

SEQ ID NO: 6805 - RNA, 19 nt, synthetic construct
  source 1..19: mol_type = other RNA
atacactggcaccagcata

SEQ ID NO: 6806 - RNA, 19 nt, synthetic construct
  source 1..19: mol_type = other RNA
gatacactggcaccagcat

SEQ ID NO: 6807 - RNA, 19 nt, synthetic construct
  source 1..19: mol_type = other RNA
tgatacactggcaccagca

SEQ ID NO: 6808 - RNA, 19 nt, synthetic construct
  source 1..19: mol_type = other RNA
gtgatacactggcaccagc

SEQ ID NO: 6809 - RNA, 19 nt, synthetic construct
  source 1..19: mol_type = other RNA
agtgatacactggcaccag

SEQ ID NO: 6810 - RNA, 19 nt, synthetic construct
  source 1..19: mol_type = other RNA
cagtgatacactggcacca

SEQ ID NO: 6811 - RNA, 19 nt, synthetic construct
  source 1..19: mol_type = other RNA
acagtgatacactggcacc

SEQ ID NO: 6812 - RNA, 19 nt, synthetic construct
  source 1..19: mol_type = other RNA
aacagtgatacactggcac

SEQ ID NO: 6813 - RNA, 19 nt, synthetic construct
  source 1..19: mol_type = other RNA
caacagtgatacactggca

SEQ ID NO: 6814 - RNA, 19 nt, synthetic construct
  source 1..19: mol_type = other RNA
ccaacagtgatacactggc

SEQ ID NO: 6815 - RNA, 19 nt, synthetic construct
  source 1..19: mol_type = other RNA
gccaacagtgatacactgg

SEQ ID NO: 6816 - RNA, 19 nt, synthetic construct
  source 1..19: mol_type = other RNA
tgccaacagtgatacactg

SEQ ID NO: 6817 - RNA, 19 nt, synthetic construct
  source 1..19: mol_type = other RNA
gtgccaacagtgatacact

SEQ ID NO: 6818 - RNA, 19 nt, synthetic construct
  source 1..19: mol_type = other RNA
agtgccaacagtgatacac

SEQ ID NO: 6819 - RNA, 19 nt, synthetic construct
  source 1..19: mol_type = other RNA
tagtgccaacagtgataca

SEQ ID NO: 6820 - RNA, 19 nt, synthetic construct
  source 1..19: mol_type = other RNA
gtagtgccaacagtgatac

SEQ ID NO: 6821 - RNA, 19 nt, synthetic construct
  source 1..19: mol_type = other RNA
agtagtgccaacagtgata

SEQ ID NO: 6822 - RNA, 19 nt, synthetic construct
  source 1..19: mol_type = other RNA
aagtagtgccaacagtgat

SEQ ID NO: 6823 - RNA, 19 nt, synthetic construct
  source 1..19: mol_type = other RNA
aaagtagtgccaacagtga

SEQ ID NO: 6824 - RNA, 19 nt, synthetic construct
  source 1..19: mol_type = other RNA
caaagtagtgccaacagtg

SEQ ID NO: 6825 - RNA, 19 nt, synthetic construct
  source 1..19: mol_type = other RNA
tcaaagtagtgccaacagt

SEQ ID NO: 6826 - RNA, 19 nt, synthetic construct
  source 1..19: mol_type = other RNA
ctcaaagtagtgccaacag

SEQ ID NO: 6827 - RNA, 19 nt, synthetic construct
  source 1..19: mol_type = other RNA
actcaaagtagtgccaaca

SEQ ID NO: 6828 - RNA, 19 nt, synthetic construct
  source 1..19: mol_type = other RNA
aactcaaagtagtgccaac

SEQ ID NO: 6829 - RNA, 19 nt, synthetic construct
  source 1..19: mol_type = other RNA
taactcaaagtagtgccaa

SEQ ID NO: 6830 - RNA, 19 nt, synthetic construct
  source 1..19: mol_type = other RNA
gtaactcaaagtagtgcca

SEQ ID NO: 6831 - RNA, 19 nt, synthetic construct
  source 1..19: mol_type = other RNA
agtaactcaaagtagtgcc

SEQ ID NO: 6832 - RNA, 19 nt, synthetic construct
  source 1..19: mol_type = other RNA
tagtaactcaaagtagtgc

SEQ ID NO: 6833 - RNA, 19 nt, synthetic construct
  source 1..19: mol_type = other RNA
ttagtaactcaaagtagtg

SEQ ID NO: 6834 - RNA, 19 nt, synthetic construct
  source 1..19: mol_type = other RNA
tttagtaactcaaagtagt

SEQ ID NO: 6835 - RNA, 19 nt, synthetic construct
  source 1..19: mol_type = other RNA
ctttagtaactcaaagtag

SEQ ID NO: 6836 - RNA, 19 nt, synthetic construct
  source 1..19: mol_type = other RNA
gctttagtaactcaaagta

SEQ ID NO: 6837 - RNA, 19 nt, synthetic construct
  source 1..19: mol_type = other RNA
tgctttagtaactcaaagt

SEQ ID NO: 6838 - RNA, 19 nt, synthetic construct
  source 1..19: mol_type = other RNA
ttgctttagtaactcaaag

SEQ ID NO: 6839 - RNA, 19 nt, synthetic construct
  source 1..19: mol_type = other RNA
attgctttagtaactcaaa

SEQ ID NO: 6840 - RNA, 19 nt, synthetic construct
  source 1..19: mol_type = other RNA
aattgctttagtaactcaa

SEQ ID NO: 6841 - RNA, 19 nt, synthetic construct
  source 1..19: mol_type = other RNA
caattgctttagtaactca

SEQ ID NO: 6842 - RNA, 19 nt, synthetic construct
  source 1..19: mol_type = other RNA
tcaattgctttagtaactc

SEQ ID NO: 6843 - RNA, 19 nt, synthetic construct
  source 1..19: mol_type = other RNA
ttcaattgctttagtaact

SEQ ID NO: 6844 - RNA, 19 nt, synthetic construct
  source 1..19: mol_type = other RNA
tttcaattgctttagtaac

SEQ ID NO: 6845 - RNA, 19 nt, synthetic construct
  source 1..19: mol_type = other RNA
ctttcaattgctttagtaa

SEQ ID NO: 6846 - RNA, 19 nt, synthetic construct
  source 1..19: mol_type = other RNA
gctttcaattgctttagta

SEQ ID NO: 6847 - RNA, 19 nt, synthetic construct
  source 1..19: mol_type = other RNA
tgctttcaattgctttagt

SEQ ID NO: 6848 - RNA, 19 nt, synthetic construct
  source 1..19: mol_type = other RNA
atgctttcaattgctttag

SEQ ID NO: 6849 - RNA, 19 nt, synthetic construct
  source 1..19: mol_type = other RNA
catgctttcaattgcttta

SEQ ID NO: 6850 - RNA, 19 nt, synthetic construct
  source 1..19: mol_type = other RNA
acatgctttcaattgcttt

SEQ ID NO: 6851 - RNA, 19 nt, synthetic construct
  source 1..19: mol_type = other RNA
tacatgctttcaattgctt

SEQ ID NO: 6852 - RNA, 19 nt, synthetic construct
  source 1..19: mol_type = other RNA
ctacatgctttcaattgct

SEQ ID NO: 6853 - RNA, 19 nt, synthetic construct
  source 1..19: mol_type = other RNA
actacatgctttcaattgc

SEQ ID NO: 6854 - RNA, 19 nt, synthetic construct
  source 1..19: mol_type = other RNA
cactacatgctttcaattg

SEQ ID NO: 6855 - RNA, 19 nt, synthetic construct
  source 1..19: mol_type = other RNA
tcactacatgctttcaatt

SEQ ID NO: 6856 - RNA, 19 nt, synthetic construct
  source 1..19: mol_type = other RNA
ttcactacatgctttcaat

SEQ ID NO: 6857 - RNA, 19 nt, synthetic construct
  source 1..19: mol_type = other RNA
cttcactacatgctttcaa

SEQ ID NO: 6858 - RNA, 19 nt, synthetic construct
  source 1..19: mol_type = other RNA
tcttcactacatgctttca

SEQ ID NO: 6859 - RNA, 19 nt, synthetic construct
  source 1..19: mol_type = other RNA
ttcttcactacatgctttc

SEQ ID NO: 6860 - RNA, 19 nt, synthetic construct
  source 1..19: mol_type = other RNA
gttcttcactacatgcttt

SEQ ID NO: 6861 - RNA, 19 nt, synthetic construct
  source 1..19: mol_type = other RNA
tgttcttcactacatgctt

SEQ ID NO: 6862 - RNA, 19 nt, synthetic construct
  source 1..19: mol_type = other RNA
ttgttcttcactacatgct

SEQ ID NO: 6863 - RNA, 19 nt, synthetic construct
  source 1..19: mol_type = other RNA
cttgttcttcactacatgc

SEQ ID NO: 6864 - RNA, 19 nt, synthetic construct
  source 1..19: mol_type = other RNA
tcttgttcttcactacatg

SEQ ID NO: 6865 - RNA, 19 nt, synthetic construct
  source 1..19: mol_type = other RNA
ttcttgttcttcactacat

SEQ ID NO: 6866 - RNA, 19 nt, synthetic construct
  source 1..19: mol_type = other RNA
cttcttgttcttcactaca

SEQ ID NO: 6867 - RNA, 19 nt, synthetic construct
  source 1..19: mol_type = other RNA
tcttcttgttcttcactac

SEQ ID NO: 6868 - RNA, 19 nt, synthetic construct
  source 1..19: mol_type = other RNA
gtcttcttgttcttcacta

SEQ ID NO: 6869 - RNA, 19 nt, synthetic construct
  source 1..19: mol_type = other RNA
tgtcttcttgttcttcact

SEQ ID NO: 6870 - RNA, 19 nt, synthetic construct
  source 1..19: mol_type = other RNA
ctgtcttcttgttcttcac

SEQ ID NO: 6871 - RNA, 19 nt, synthetic construct
  source 1..19: mol_type = other RNA
tctgtcttcttgttcttca

SEQ ID NO: 6872 - RNA, 19 nt, synthetic construct
  source 1..19: mol_type = other RNA
ctctgtcttcttgttcttc

SEQ ID NO: 6873 - RNA, 19 nt, synthetic construct
  source 1..19: mol_type = other RNA
tctctgtcttcttgttctt

SEQ ID NO: 6874 - RNA, 19 nt, synthetic construct
  source 1..19: mol_type = other RNA
ttctctgtcttcttgttct

SEQ ID NO: 6875 - RNA, 19 nt, synthetic construct
  source 1..19: mol_type = other RNA
attctctgtcttcttgttc

SEQ ID NO: 6876 - RNA, 19 nt, synthetic construct
  source 1..19: mol_type = other RNA
cattctctgtcttcttgtt

SEQ ID NO: 6877 - RNA, 19 nt, synthetic construct
  source 1..19: mol_type = other RNA
acattctctgtcttcttgt

SEQ ID NO: 6878 - RNA, 19 nt, synthetic construct
  source 1..19: mol_type = other RNA
aacattctctgtcttcttg

SEQ ID NO: 6879 - RNA, 19 nt, synthetic construct
  source 1..19: mol_type = other RNA
aaacattctctgtcttctt

SEQ ID NO: 6880 - RNA, 19 nt, synthetic construct
  source 1..19: mol_type = other RNA
caaacattctctgtcttct

SEQ ID NO: 6881 - RNA, 19 nt, synthetic construct
  source 1..19: mol_type = other RNA
tcaaacattctctgtcttc

SEQ ID NO: 6882 - RNA, 19 nt, synthetic construct
  source 1..19: mol_type = other RNA
ttcaaacattctctgtctt

SEQ ID NO: 6883 - RNA, 19 nt, synthetic construct
  source 1..19: mol_type = other RNA
gttcaaacattctctgtct

SEQ ID NO: 6884 - RNA, 19 nt, synthetic construct
  source 1..19: mol_type = other RNA
ggttcaaacattctctgtc

SEQ ID NO: 6885 - RNA, 19 nt, synthetic construct
  source 1..19: mol_type = other RNA
tggttcaaacattctctgt

SEQ ID NO: 6886 - RNA, 19 nt, synthetic construct
  source 1..19: mol_type = other RNA
ttggttcaaacattctctg

SEQ ID NO: 6887 - RNA, 19 nt, synthetic construct
  source 1..19: mol_type = other RNA
cttggttcaaacattctct

SEQ ID NO: 6888 - RNA, 19 nt, synthetic construct
  source 1..19: mol_type = other RNA
gcttggttcaaacattctc

SEQ ID NO: 6889 - RNA, 19 nt, synthetic construct
  source 1..19: mol_type = other RNA
agcttggttcaaacattct

SEQ ID NO: 6890 - RNA, 19 nt, synthetic construct
  source 1..19: mol_type = other RNA
tagcttggttcaaacattc

SEQ ID NO: 6891 - RNA, 19 nt, synthetic construct
  source 1..19: mol_type = other RNA
atagcttggttcaaacatt

SEQ ID NO: 6892 - RNA, 19 nt, synthetic construct
  source 1..19: mol_type = other RNA
aatagcttggttcaaacat

SEQ ID NO: 6893 - RNA, 19 nt, synthetic construct
  source 1..19: mol_type = other RNA
taatagcttggttcaaaca

SEQ ID NO: 6894 - RNA, 19 nt, synthetic construct
  source 1..19: mol_type = other RNA
gtaatagcttggttcaaac

SEQ ID NO: 6895 - RNA, 19 nt, synthetic construct
  source 1..19: mol_type = other RNA
agtaatagcttggttcaaa

SEQ ID NO: 6896 - RNA, 19 nt, synthetic construct
  source 1..19: mol_type = other RNA
cagtaatagcttggttcaa

SEQ ID NO: 6897 - RNA, 19 nt, synthetic construct
  source 1..19: mol_type = other RNA
gcagtaatagcttggttca

SEQ ID NO: 6898 - RNA, 19 nt, synthetic construct
  source 1..19: mol_type = other RNA
agcagtaatagcttggttc

SEQ ID NO: 6899 - RNA, 19 nt, synthetic construct
  source 1..19: mol_type = other RNA
gagcagtaatagcttggtt

SEQ ID NO: 6900 - RNA, 19 nt, synthetic construct
  source 1..19: mol_type = other RNA
agagcagtaatagcttggt

SEQ ID NO: 6901 - RNA, 19 nt, synthetic construct
  source 1..19: mol_type = other RNA
gagagcagtaatagcttgg

SEQ ID NO: 6902 - RNA, 19 nt, synthetic construct
  source 1..19: mol_type = other RNA
tgagagcagtaatagcttg

SEQ ID NO: 6903 - RNA, 19 nt, synthetic construct
  source 1..19: mol_type = other RNA
atgagagcagtaatagctt

SEQ ID NO: 6904 - RNA, 19 nt, synthetic construct
  source 1..19: mol_type = other RNA
catgagagcagtaatagct

SEQ ID NO: 6905 - RNA, 19 nt, synthetic construct
  source 1..19: mol_type = other RNA
tcatgagagcagtaatagc

SEQ ID NO: 6906 - RNA, 19 nt, synthetic construct
  source 1..19: mol_type = other RNA
ttcatgagagcagtaatag

SEQ ID NO: 6907 - RNA, 19 nt, synthetic construct
  source 1..19: mol_type = other RNA
attcatgagagcagtaata

SEQ ID NO: 6908 - RNA, 19 nt, synthetic construct
  source 1..19: mol_type = other RNA
gattcatgagagcagtaat

SEQ ID NO: 6909 - RNA, 19 nt, synthetic construct
  source 1..19: mol_type = other RNA
agattcatgagagcagtaa

SEQ ID NO: 6910 - RNA, 19 nt, synthetic construct
  source 1..19: mol_type = other RNA
gagattcatgagagcagta

SEQ ID NO: 6911 - RNA, 19 nt, synthetic construct
  source 1..19: mol_type = other RNA
ggagattcatgagagcagt

SEQ ID NO: 6912 - RNA, 19 nt, synthetic construct
  source 1..19: mol_type = other RNA
tggagattcatgagagcag

SEQ ID NO: 6913 - RNA, 19 nt, synthetic construct
  source 1..19: mol_type = other RNA
ttggagattcatgagagca

SEQ ID NO: 6914 - RNA, 19 nt, synthetic construct
  source 1..19: mol_type = other RNA
cttggagattcatgagagc

SEQ ID NO: 6915 - RNA, 19 nt, synthetic construct
  source 1..19: mol_type = other RNA
ccttggagattcatgagag

SEQ ID NO: 6916 - RNA, 19 nt, synthetic construct
  source 1..19: mol_type = other RNA
accttggagattcatgaga

SEQ ID NO: 6917 - RNA, 19 nt, synthetic construct
  source 1..19: mol_type = other RNA
taccttggagattcatgag

SEQ ID NO: 6918 - RNA, 19 nt, synthetic construct
  source 1..19: mol_type = other RNA
ctaccttggagattcatga

SEQ ID NO: 6919 - RNA, 19 nt, synthetic construct
  source 1..19: mol_type = other RNA
gctaccttggagattcatg

SEQ ID NO: 6920 - RNA, 19 nt, synthetic construct
  source 1..19: mol_type = other RNA
tgctaccttggagattcat

SEQ ID NO: 6921 - RNA, 19 nt, synthetic construct
  source 1..19: mol_type = other RNA
atgctaccttggagattca

SEQ ID NO: 6922 - RNA, 19 nt, synthetic construct
  source 1..19: mol_type = other RNA
catgctaccttggagattc

SEQ ID NO: 6923 - RNA, 19 nt, synthetic construct
  source 1..19: mol_type = other RNA
ccatgctaccttggagatt

SEQ ID NO: 6924 - RNA, 19 nt, synthetic construct
  source 1..19: mol_type = other RNA
tccatgctaccttggagat

SEQ ID NO: 6925 - RNA, 19 nt, synthetic construct
  source 1..19: mol_type = other RNA
gtccatgctaccttggaga

SEQ ID NO: 6926 - RNA, 19 nt, synthetic construct
  source 1..19: mol_type = other RNA
ggtccatgctaccttggag

SEQ ID NO: 6927 - RNA, 19 nt, synthetic construct
  source 1..19: mol_type = other RNA
cggtccatgctaccttgga

SEQ ID NO: 6928 - RNA, 19 nt, synthetic construct
  source 1..19: mol_type = other RNA
tcggtccatgctaccttgg

SEQ ID NO: 6929 - RNA, 19 nt, synthetic construct
  source 1..19: mol_type = other RNA
ttcggtccatgctaccttg

SEQ ID NO: 6930 - RNA, 19 nt, synthetic construct
  source 1..19: mol_type = other RNA
attcggtccatgctacctt

SEQ ID NO: 6931 - RNA, 19 nt, synthetic construct
  source 1..19: mol_type = other RNA
aattcggtccatgctacct

SEQ ID NO: 6932 - RNA, 19 nt, synthetic construct
  source 1..19: mol_type = other RNA
aaattcggtccatgctacc

SEQ ID NO: 6933 - RNA, 19 nt, synthetic construct
  source 1..19: mol_type = other RNA
taaattcggtccatgctac

SEQ ID NO: 6934 - RNA, 19 nt, synthetic construct
  source 1..19: mol_type = other RNA
gtaaattcggtccatgcta

SEQ ID NO: 6935 - RNA, 19 nt, synthetic construct
  source 1..19: mol_type = other RNA
tgtaaattcggtccatgct

SEQ ID NO: 6936 - RNA, 19 nt, synthetic construct
  source 1..19: mol_type = other RNA
ttgtaaattcggtccatgc

SEQ ID NO: 6937 - RNA, 19 nt, synthetic construct
  source 1..19: mol_type = other RNA
cttgtaaattcggtccatg

SEQ ID NO: 6938 - RNA, 19 nt, synthetic construct
  source 1..19: mol_type = other RNA
gcttgtaaattcggtccat

SEQ ID NO: 6939 - RNA, 19 nt, synthetic construct
  source 1..19: mol_type = other RNA
tgcttgtaaattcggtcca

SEQ ID NO: 6940 - RNA, 19 nt, synthetic construct
  source 1..19: mol_type = other RNA
ctgcttgtaaattcggtcc

SEQ ID NO: 6941 - RNA, 19 nt, synthetic construct
  source 1..19: mol_type = other RNA
actgcttgtaaattcggtc

SEQ ID NO: 6942 - RNA, 19 nt, synthetic construct
  source 1..19: mol_type = other RNA
tactgcttgtaaattcggt

SEQ ID NO: 6943 - RNA, 19 nt, synthetic construct
  source 1..19: mol_type = other RNA
atactgcttgtaaattcgg

SEQ ID NO: 6944 - RNA, 19 nt, synthetic construct
  source 1..19: mol_type = other RNA
aatactgcttgtaaattcg

SEQ ID NO: 6945 - RNA, 19 nt, synthetic construct
  source 1..19: mol_type = other RNA
gaatactgcttgtaaattc

SEQ ID NO: 6946 - RNA, 19 nt, synthetic construct
  source 1..19: mol_type = other RNA
tgaatactgcttgtaaatt

SEQ ID NO: 6947 - RNA, 19 nt, synthetic construct
  source 1..19: mol_type = other RNA
gtgaatactgcttgtaaat

SEQ ID NO: 6948 - RNA, 19 nt, synthetic construct
  source 1..19: mol_type = other RNA
ggtgaatactgcttgtaaa

SEQ ID NO: 6949 - RNA, 19 nt, synthetic construct
  source 1..19: mol_type = other RNA
aggtgaatactgcttgtaa

SEQ ID NO: 6950 - RNA, 19 nt, synthetic construct
  source 1..19: mol_type = other RNA
taggtgaatactgcttgta

SEQ ID NO: 6951 - RNA, 19 nt, synthetic construct
  source 1..19: mol_type = other RNA
ctaggtgaatactgcttgt

SEQ ID NO: 6952 - RNA, 19 nt, synthetic construct
  source 1..19: mol_type = other RNA
tctaggtgaatactgcttg

SEQ ID NO: 6953 - RNA, 19 nt, synthetic construct
  source 1..19: mol_type = other RNA
gtctaggtgaatactgctt

SEQ ID NO: 6954 - RNA, 19 nt, synthetic construct
  source 1..19: mol_type = other RNA
cgtctaggtgaatactgct

SEQ ID NO: 6955 - RNA, 19 nt, synthetic construct
  source 1..19: mol_type = other RNA
acgtctaggtgaatactgc

SEQ ID NO: 6956 - RNA, 19 nt, synthetic construct
  source 1..19: mol_type = other RNA
gacgtctaggtgaatactg

SEQ ID NO: 6957 - RNA, 19 nt, synthetic construct
  source 1..19: mol_type = other RNA
cgacgtctaggtgaatact

SEQ ID NO: 6958 - RNA, 19 nt, synthetic construct
  source 1..19: mol_type = other RNA
tcgacgtctaggtgaatac

SEQ ID NO: 6959 - RNA, 19 nt, synthetic construct
  source 1..19: mol_type = other RNA
gtcgacgtctaggtgaata

SEQ ID NO: 6960 - RNA, 19 nt, synthetic construct
  source 1..19: mol_type = other RNA
ggtcgacgtctaggtgaat

SEQ ID NO: 6961 - RNA, 19 nt, synthetic construct
  source 1..19: mol_type = other RNA
aggtcgacgtctaggtgaa

SEQ ID NO: 6962 - RNA, 19 nt, synthetic construct
  source 1..19: mol_type = other RNA
caggtcgacgtctaggtga

SEQ ID NO: 6963 - RNA, 19 nt, synthetic construct
  source 1..19: mol_type = other RNA
ccaggtcgacgtctaggtg

SEQ ID NO: 6964 - RNA, 19 nt, synthetic construct
  source 1..19: mol_type = other RNA
tccaggtcgacgtctaggt

SEQ ID NO: 6965 - RNA, 19 nt, synthetic construct
  source 1..19: mol_type = other RNA
ctccaggtcgacgtctagg

SEQ ID NO: 6966 - RNA, 19 nt, synthetic construct
  source 1..19: mol_type = other RNA
tctccaggtcgacgtctag

SEQ ID NO: 6967 - RNA, 19 nt, synthetic construct
  source 1..19: mol_type = other RNA
atctccaggtcgacgtcta

SEQ ID NO: 6968 - RNA, 19 nt, synthetic construct
  source 1..19: mol_type = other RNA
gatctccaggtcgacgtct

SEQ ID NO: 6969 - RNA, 19 nt, synthetic construct
  source 1..19: mol_type = other RNA
ggatctccaggtcgacgtc

SEQ ID NO: 6970 - RNA, 19 nt, synthetic construct
  source 1..19: mol_type = other RNA
aggatctccaggtcgacgt

SEQ ID NO: 6971 - RNA, 19 nt, synthetic construct
  source 1..19: mol_type = other RNA
caggatctccaggtcgacg

SEQ ID NO: 6972 - RNA, 19 nt, synthetic construct
  source 1..19: mol_type = other RNA
acaggatctccaggtcgac

SEQ ID NO: 6973 - RNA, 19 nt, synthetic construct
  source 1..19: mol_type = other RNA
aacaggatctccaggtcga

SEQ ID NO: 6974 - RNA, 19 nt, synthetic construct
  source 1..19: mol_type = other RNA
aaacaggatctccaggtcg

SEQ ID NO: 6975 - RNA, 19 nt, synthetic construct
  source 1..19: mol_type = other RNA
caaacaggatctccaggtc

SEQ ID NO: 6976 - RNA, 19 nt, synthetic construct
  source 1..19: mol_type = other RNA
gcaaacaggatctccaggt

SEQ ID NO: 6977 - RNA, 19 nt, synthetic construct
  source 1..19: mol_type = other RNA
ggcaaacaggatctccagg

SEQ ID NO: 6978 - RNA, 19 nt, synthetic construct
  source 1..19: mol_type = other RNA
gggcaaacaggatctccag

SEQ ID NO: 6979 - RNA, 19 nt, synthetic construct
  source 1..19: mol_type = other RNA
agggcaaacaggatctcca

SEQ ID NO: 6980 - RNA, 19 nt, synthetic construct
  source 1..19: mol_type = other RNA
aagggcaaacaggatctcc

SEQ ID NO: 6981 - RNA, 19 nt, synthetic construct
  source 1..19: mol_type = other RNA
aaagggcaaacaggatctc

SEQ ID NO: 6982 - RNA, 19 nt, synthetic construct
  source 1..19: mol_type = other RNA
aaaagggcaaacaggatct

SEQ ID NO: 6983 - RNA, 19 nt, synthetic construct
  source 1..19: mol_type = other RNA
aaaaagggcaaacaggatc

SEQ ID NO: 6984 - RNA, 19 nt, synthetic construct
  source 1..19: mol_type = other RNA
taaaaagggcaaacaggat

SEQ ID NO: 6985 - RNA, 19 nt, synthetic construct
  source 1..19: mol_type = other RNA
ataaaaagggcaaacagga

SEQ ID NO: 6986 - RNA, 19 nt, synthetic construct
  source 1..19: mol_type = other RNA
tataaaaagggcaaacagg

SEQ ID NO: 6987 - RNA, 19 nt, synthetic construct
  source 1..19: mol_type = other RNA
ctataaaaagggcaaacag

SEQ ID NO: 6988 - RNA, 19 nt, synthetic construct
  source 1..19: mol_type = other RNA
actataaaaagggcaaaca

SEQ ID NO: 6989 - RNA, 19 nt, synthetic construct
  source 1..19: mol_type = other RNA
gactataaaaagggcaaac

SEQ ID NO: 6990 - RNA, 19 nt, synthetic construct
  source 1..19: mol_type = other RNA
tgactataaaaagggcaaa

SEQ ID NO: 6991 - RNA, 19 nt, synthetic construct
  source 1..19: mol_type = other RNA
gtgactataaaaagggcaa

SEQ ID NO: 6992 - RNA, 19 nt, synthetic construct
  source 1..19: mol_type = other RNA
ggtgactataaaaagggca

SEQ ID NO: 6993 - RNA, 19 nt, synthetic construct
  source 1..19: mol_type = other RNA
tggtgactataaaaagggc

SEQ ID NO: 6994 - RNA, 19 nt, synthetic construct
  source 1..19: mol_type = other RNA
ttggtgactataaaaaggg

SEQ ID NO: 6995 - RNA, 19 nt, synthetic construct
  source 1..19: mol_type = other RNA
attggtgactataaaaagg

SEQ ID NO: 6996 - RNA, 19 nt, synthetic construct
  source 1..19: mol_type = other RNA
aattggtgactataaaaag

SEQ ID NO: 6997 - RNA, 19 nt, synthetic construct
  source 1..19: mol_type = other RNA
taattggtgactataaaaa

SEQ ID NO: 6998 - RNA, 19 nt, synthetic construct
  source 1..19: mol_type = other RNA
ttaattggtgactataaaa

SEQ ID NO: 6999 - RNA, 19 nt, synthetic construct
  source 1..19: mol_type = other RNA
cttaattggtgactataaa

SEQ ID NO: 7000 - RNA, 19 nt, synthetic construct
  source 1..19: mol_type = other RNA
tcttaattggtgactataa

SEQ ID NO: 7001 - RNA, 19 nt, synthetic construct
  source 1..19: mol_type = other RNA
ttcttaattggtgactata

SEQ ID NO: 7002 - RNA, 19 nt, synthetic construct
  source 1..19: mol_type = other RNA
cttcttaattggtgactat

SEQ ID NO: 7003 - RNA, 19 nt, synthetic construct
  source 1..19: mol_type = other RNA
gcttcttaattggtgacta

SEQ ID NO: 7004 - RNA, 19 nt, synthetic construct
  source 1..19: mol_type = other RNA
tgcttcttaattggtgact

SEQ ID NO: 7005 - RNA, 19 nt, synthetic construct
  source 1..19: mol_type = other RNA
ttgcttcttaattggtgac

SEQ ID NO: 7006 - RNA, 19 nt, synthetic construct
  source 1..19: mol_type = other RNA
tttgcttcttaattggtga

SEQ ID NO: 7007 - RNA, 19 nt, synthetic construct
  source 1..19: mol_type = other RNA
gtttgcttcttaattggtg

SEQ ID NO: 7008 - RNA, 19 nt, synthetic construct
  source 1..19: mol_type = other RNA
tgtttgcttcttaattggt

SEQ ID NO: 7009 - RNA, 19 nt, synthetic construct
  source 1..19: mol_type = other RNA
gtgtttgcttcttaattgg

SEQ ID NO: 7010 - RNA, 19 nt, synthetic construct
  source 1..19: mol_type = other RNA
ggtgtttgcttcttaattg

SEQ ID NO: 7011 - RNA, 19 nt, synthetic construct
  source 1..19: mol_type = other RNA
aggtgtttgcttcttaatt

SEQ ID NO: 7012 - RNA, 19 nt, synthetic construct
  source 1..19: mol_type = other RNA
caggtgtttgcttcttaat

SEQ ID NO: 7013 - RNA, 19 nt, synthetic construct
  source 1..19: mol_type = other RNA
ccaggtgtttgcttcttaa

SEQ ID NO: 7014 - RNA, 19 nt, synthetic construct
  source 1..19: mol_type = other RNA
gccaggtgtttgcttctta

SEQ ID NO: 7015 - RNA, 19 nt, synthetic construct
  source 1..19: mol_type = other RNA
agccaggtgtttgcttctt

SEQ ID NO: 7016 - RNA, 19 nt, synthetic construct
  source 1..19: mol_type = other RNA
tagccaggtgtttgcttct

SEQ ID NO: 7017 - RNA, 19 nt, synthetic construct
  source 1..19: mol_type = other RNA
atagccaggtgtttgcttc

SEQ ID NO: 7018 - RNA, 19 nt, synthetic construct
  source 1..19: mol_type = other RNA
gatagccaggtgtttgctt

SEQ ID NO: 7019 - RNA, 19 nt, synthetic construct
  source 1..19: mol_type = other RNA
tgatagccaggtgtttgct

SEQ ID NO: 7020 - RNA, 19 nt, synthetic construct
  source 1..19: mol_type = other RNA
ttgatagccaggtgtttgc

SEQ ID NO: 7021 - RNA, 19 nt, synthetic construct
  source 1..19: mol_type = other RNA
tttgatagccaggtgtttg

SEQ ID NO: 7022 - RNA, 19 nt, synthetic construct
  source 1..19: mol_type = other RNA
ttttgatagccaggtgttt

SEQ ID NO: 7023 - RNA, 19 nt, synthetic construct
  source 1..19: mol_type = other RNA
tttttgatagccaggtgtt

SEQ ID NO: 7024 - RNA, 19 nt, synthetic construct
  source 1..19: mol_type = other RNA
ttttttgatagccaggtgt

SEQ ID NO: 7025 - RNA, 19 nt, synthetic construct
  source 1..19: mol_type = other RNA
tttttttgatagccaggtg

SEQ ID NO: 7026 - RNA, 19 nt, synthetic construct
  source 1..19: mol_type = other RNA
atttttttgatagccaggt

SEQ ID NO: 7027 - RNA, 19 nt, synthetic construct
  source 1..19: mol_type = other RNA
catttttttgatagccagg

SEQ ID NO: 7028 - RNA, 19 nt, synthetic construct
  source 1..19: mol_type = other RNA
tcatttttttgatagccag

SEQ ID NO: 7029 - RNA, 19 nt, synthetic construct
  source 1..19: mol_type = other RNA
ttcatttttttgatagcca

SEQ ID NO: 7030 - RNA, 19 nt, synthetic construct
  source 1..19: mol_type = other RNA
attcatttttttgatagcc

SEQ ID NO: 7031 - RNA, 19 nt, synthetic construct
  source 1..19: mol_type = other RNA
cattcatttttttgatagc

SEQ ID NO: 7032 - RNA, 19 nt, synthetic construct
  source 1..19: mol_type = other RNA
tcattcatttttttgatag

SEQ ID NO: 7033 - RNA, 19 nt, synthetic construct
  source 1..19: mol_type = other RNA
ttcattcatttttttgata

SEQ ID NO: 7034 - RNA, 19 nt, synthetic construct
  source 1..19: mol_type = other RNA
tttcattcatttttttgat

SEQ ID NO: 7035 - RNA, 19 nt, synthetic construct
  source 1..19: mol_type = other RNA
atttcattcatttttttga

SEQ ID NO: 7036 - RNA, 19 nt, synthetic construct
  source 1..19: mol_type = other RNA
aatttcattcatttttttg

SEQ ID NO: 7037 - RNA, 19 nt, synthetic construct
  source 1..19: mol_type = other RNA
gaatttcattcattttttt

SEQ ID NO: 7038 - RNA, 19 nt, synthetic construct
  source 1..19: mol_type = other RNA
tgaatttcattcatttttt

SEQ ID NO: 7039 - RNA, 19 nt, synthetic construct
  source 1..19: mol_type = other RNA
ctgaatttcattcattttt

SEQ ID NO: 7040 - RNA, 19 nt, synthetic construct
  source 1..19: mol_type = other RNA
tctgaatttcattcatttt

SEQ ID NO: 7041 - RNA, 19 nt, synthetic construct
  source 1..19: mol_type = other RNA
ttctgaatttcattcattt

SEQ ID NO: 7042 - RNA, 19 nt, synthetic construct
  source 1..19: mol_type = other RNA
tttctgaatttcattcatt

SEQ ID NO: 7043 - RNA, 19 nt, synthetic construct
  source 1..19: mol_type = other RNA
ttttctgaatttcattcat

SEQ ID NO: 7044 - RNA, 19 nt, synthetic construct
  source 1..19: mol_type = other RNA
tttttctgaatttcattca

SEQ ID NO: 7045 - RNA, 19 nt, synthetic construct
  source 1..19: mol_type = other RNA
atttttctgaatttcattc

SEQ ID NO: 7046 - RNA, 19 nt, synthetic construct
  source 1..19: mol_type = other RNA
tatttttctgaatttcatt

SEQ ID NO: 7047 - RNA, 19 nt, synthetic construct
  source 1..19: mol_type = other RNA
atatttttctgaatttcat

SEQ ID NO: 7048 - RNA, 19 nt, synthetic construct
  source 1..19: mol_type = other RNA
gatatttttctgaatttca

SEQ ID NO: 7049 - RNA, 19 nt, synthetic construct
  source 1..19: mol_type = other RNA
cgatatttttctgaatttc

SEQ ID NO: 7050 - RNA, 19 nt, synthetic construct
  source 1..19: mol_type = other RNA
tcgatatttttctgaattt

SEQ ID NO: 7051 - RNA, 19 nt, synthetic construct
  source 1..19: mol_type = other RNA
atcgatatttttctgaatt

SEQ ID NO: 7052 - RNA, 19 nt, synthetic construct
  source 1..19: mol_type = other RNA
catcgatatttttctgaat

SEQ ID NO: 7053 - RNA, 19 nt, synthetic construct
  source 1..19: mol_type = other RNA
ccatcgatatttttctgaa

SEQ ID NO: 7054 - RNA, 19 nt, synthetic construct
  source 1..19: mol_type = other RNA
tccatcgatatttttctga

SEQ ID NO: 7055 - RNA, 19 nt, synthetic construct
  source 1..19: mol_type = other RNA
atccatcgatatttttctg

SEQ ID NO: 7056 - RNA, 19 nt, synthetic construct
  source 1..19: mol_type = other RNA
catccatcgatatttttct

SEQ ID NO: 7057 - RNA, 19 nt, synthetic construct
  source 1..19: mol_type = other RNA
ccatccatcgatatttttc

SEQ ID NO: 7058 - RNA, 19 nt, synthetic construct
  source 1..19: mol_type = other RNA
cccatccatcgatattttt

SEQ ID NO: 7059 - RNA, 19 nt, synthetic construct
  source 1..19: mol_type = other RNA
tcccatccatcgatatttt

SEQ ID NO: 7060 - RNA, 19 nt, synthetic construct
  source 1..19: mol_type = other RNA
ttcccatccatcgatattt

SEQ ID NO: 7061 - RNA, 19 nt, synthetic construct
  source 1..19: mol_type = other RNA
cttcccatccatcgatatt

SEQ ID NO: 7062 - RNA, 19 nt, synthetic construct
  source 1..19: mol_type = other RNA
ccttcccatccatcgatat

SEQ ID NO: 7063 - RNA, 19 nt, synthetic construct
  source 1..19: mol_type = other RNA
gccttcccatccatcgata

SEQ ID NO: 7064 - RNA, 19 nt, synthetic construct
  source 1..19: mol_type = other RNA
tgccttcccatccatcgat

SEQ ID NO: 7065 - RNA, 19 nt, synthetic construct
  source 1..19: mol_type = other RNA
ttgccttcccatccatcga

SEQ ID NO: 7066 - RNA, 19 nt, synthetic construct
  source 1..19: mol_type = other RNA
tttgccttcccatccatcg

SEQ ID NO: 7067 - RNA, 19 nt, synthetic construct
  source 1..19: mol_type = other RNA
ctttgccttcccatccatc

SEQ ID NO: 7068 - RNA, 19 nt, synthetic construct
  source 1..19: mol_type = other RNA
tctttgccttcccatccat

SEQ ID NO: 7069 - RNA, 19 nt, synthetic construct
  source 1..19: mol_type = other RNA
atctttgccttcccatcca

SEQ ID NO: 7070 - RNA, 19 nt, synthetic construct
  source 1..19: mol_type = other RNA
tatctttgccttcccatcc

SEQ ID NO: 7071 - RNA, 19 nt, synthetic construct
  source 1..19: mol_type = other RNA
atatctttgccttcccatc

SEQ ID NO: 7072 - RNA, 19 nt, synthetic construct
  source 1..19: mol_type = other RNA
aatatctttgccttcccat

SEQ ID NO: 7073 - RNA, 19 nt, synthetic construct
  source 1..19: mol_type = other RNA
caatatctttgccttccca

SEQ ID NO: 7074 - RNA, 19 nt, synthetic construct
  source 1..19: mol_type = other RNA
ccaatatctttgccttccc

SEQ ID NO: 7075 - RNA, 19 nt, synthetic construct
  source 1..19: mol_type = other RNA
tccaatatctttgccttcc

SEQ ID NO: 7076 - RNA, 19 nt, synthetic construct
  source 1..19: mol_type = other RNA
gtccaatatctttgccttc

SEQ ID NO: 7077 - RNA, 19 nt, synthetic construct
  source 1..19: mol_type = other RNA
tgtccaatatctttgcctt

SEQ ID NO: 7078 - RNA, 19 nt, synthetic construct
  source 1..19: mol_type = other RNA
ctgtccaatatctttgcct

SEQ ID NO: 7079 - RNA, 19 nt, synthetic construct
  source 1..19: mol_type = other RNA
actgtccaatatctttgcc

SEQ ID NO: 7080 - RNA, 19 nt, synthetic construct
  source 1..19: mol_type = other RNA
cactgtccaatatctttgc

SEQ ID NO: 7081 - RNA, 19 nt, synthetic construct
  source 1..19: mol_type = other RNA
acactgtccaatatctttg

SEQ ID NO: 7082 - RNA, 19 nt, synthetic construct
  source 1..19: mol_type = other RNA
aacactgtccaatatcttt

SEQ ID NO: 7083 - RNA, 19 nt, synthetic construct
  source 1..19: mol_type = other RNA
caacactgtccaatatctt

SEQ ID NO: 7084 - RNA, 19 nt, synthetic construct
  source 1..19: mol_type = other RNA
acaacactgtccaatatct

SEQ ID NO: 7085 - RNA, 19 nt, synthetic construct
  source 1..19: mol_type = other RNA
tacaacactgtccaatatc

SEQ ID NO: 7086 - RNA, 19 nt, synthetic construct
  source 1..19: mol_type = other RNA
ttacaacactgtccaatat

SEQ ID NO: 7087 - RNA, 19 nt, synthetic construct
  source 1..19: mol_type = other RNA
attacaacactgtccaata

SEQ ID NO: 7088 - RNA, 19 nt, synthetic construct
  source 1..19: mol_type = other RNA
cattacaacactgtccaat

SEQ ID NO: 7089 - RNA, 19 nt, synthetic construct
  source 1..19: mol_type = other RNA
tcattacaacactgtccaa

SEQ ID NO: 7090 - RNA, 19 nt, synthetic construct
  source 1..19: mol_type = other RNA
ttcattacaacactgtcca

SEQ ID NO: 7091 - RNA, 19 nt, synthetic construct
  source 1..19: mol_type = other RNA
attcattacaacactgtcc

SEQ ID NO: 7092 - RNA, 19 nt, synthetic construct
  source 1..19: mol_type = other RNA
aattcattacaacactgtc

SEQ ID NO: 7093 - RNA, 19 nt, synthetic construct
  source 1..19: mol_type = other RNA
gaattcattacaacactgt

SEQ ID NO: 7094 - RNA, 19 nt, synthetic construct
  source 1..19: mol_type = other RNA
tgaattcattacaacactg

SEQ ID NO: 7095 - RNA, 19 nt, synthetic construct
  source 1..19: mol_type = other RNA
atgaattcattacaacact

SEQ ID NO: 7096 - RNA, 19 nt, synthetic construct
  source 1..19: mol_type = other RNA
aatgaattcattacaacac

SEQ ID NO: 7097 - RNA, 19 nt, synthetic construct
  source 1..19: mol_type = other RNA
taatgaattcattacaaca

SEQ ID NO: 7098 - RNA, 19 nt, synthetic construct
  source 1..19: mol_type = other RNA
ataatgaattcattacaac

SEQ ID NO: 7099 - RNA, 19 nt, synthetic construct
  source 1..19: mol_type = other RNA
cataatgaattcattacaa

SEQ ID NO: 7100 - RNA, 19 nt, synthetic construct
  source 1..19: mol_type = other RNA
ccataatgaattcattaca

SEQ ID NO: 7101 - RNA, 19 nt, synthetic construct
  source 1..19: mol_type = other RNA
tccataatgaattcattac

SEQ ID NO: 7102 - RNA, 19 nt, synthetic construct
  source 1..19: mol_type = other RNA
ctccataatgaattcatta

SEQ ID NO: 7103 - RNA, 19 nt, synthetic construct
  source 1..19: mol_type = other RNA
cctccataatgaattcatt

SEQ ID NO: 7104 - RNA, 19 nt, synthetic construct
  source 1..19: mol_type = other RNA
ccctccataatgaattcat

SEQ ID NO: 7105 - RNA, 19 nt, synthetic construct
  source 1..19: mol_type = other RNA
tccctccataatgaattca

SEQ ID NO: 7106 - RNA, 19 nt, synthetic construct
  source 1..19: mol_type = other RNA
gtccctccataatgaattc

SEQ ID NO: 7107 - RNA, 19 nt, synthetic construct
  source 1..19: mol_type = other RNA
ggtccctccataatgaatt

SEQ ID NO: 7108 - RNA, 19 nt, synthetic construct
  source 1..19: mol_type = other RNA
tggtccctccataatgaat

SEQ ID NO: 7109 - RNA, 19 nt, synthetic construct
  source 1..19: mol_type = other RNA
atggtccctccataatgaa

SEQ ID NO: 7110 - RNA, 19 nt, synthetic construct
  source 1..19: mol_type = other RNA
aatggtccctccataatga

SEQ ID NO: 7111 - RNA, 19 nt, synthetic construct
  source 1..19: mol_type = other RNA
caatggtccctccataatg

SEQ ID NO: 7112 - RNA, 19 nt, synthetic construct
  source 1..19: mol_type = other RNA
tcaatggtccctccataat

SEQ ID NO: 7113 - RNA, 19 nt, synthetic construct
  source 1..19: mol_type = other RNA
gtcaatggtccctccataa

SEQ ID NO: 7114 - RNA, 19 nt, synthetic construct
  source 1..19: mol_type = other RNA
tgtcaatggtccctccata

SEQ ID NO: 7115 - RNA, 19 nt, synthetic construct
  source 1..19: mol_type = other RNA
ttgtcaatggtccctccat

SEQ ID NO: 7116 - RNA, 19 nt, synthetic construct
  source 1..19: mol_type = other RNA
cttgtcaatggtccctcca

SEQ ID NO: 7117 - RNA, 19 nt, synthetic construct
  source 1..19: mol_type = other RNA
tcttgtcaatggtccctcc

SEQ ID NO: 7118 - RNA, 19 nt, synthetic construct
  source 1..19: mol_type = other RNA
ttcttgtcaatggtccctc

SEQ ID NO: 7119 - RNA, 19 nt, synthetic construct
  source 1..19: mol_type = other RNA
attcttgtcaatggtccct

SEQ ID NO: 7120 - RNA, 19 nt, synthetic construct
  source 1..19: mol_type = other RNA
gattcttgtcaatggtccc

SEQ ID NO: 7121 - RNA, 19 nt, synthetic construct
  source 1..19: mol_type = other RNA
cgattcttgtcaatggtcc

SEQ ID NO: 7122 - RNA, 19 nt, synthetic construct
  source 1..19: mol_type = other RNA
ccgattcttgtcaatggtc

SEQ ID NO: 7123 - RNA, 19 nt, synthetic construct
  source 1..19: mol_type = other RNA
accgattcttgtcaatggt

SEQ ID NO: 7124 - RNA, 19 nt, synthetic construct
  source 1..19: mol_type = other RNA
caccgattcttgtcaatgg

SEQ ID NO: 7125 - RNA, 19 nt, synthetic construct
  source 1..19: mol_type = other RNA
gcaccgattcttgtcaatg

SEQ ID NO: 7126 - RNA, 19 nt, synthetic construct
  source 1..19: mol_type = other RNA
ggcaccgattcttgtcaat

SEQ ID NO: 7127 - RNA, 19 nt, synthetic construct
  source 1..19: mol_type = other RNA
tggcaccgattcttgtcaa

SEQ ID NO: 7128 - RNA, 19 nt, synthetic construct
  source 1..19: mol_type = other RNA
ttggcaccgattcttgtca

SEQ ID NO: 7129 - RNA, 19 nt, synthetic construct
  source 1..19: mol_type = other RNA
tttggcaccgattcttgtc

SEQ ID NO: 7130 - RNA, 19 nt, synthetic construct
  source 1..19: mol_type = other RNA
gtttggcaccgattcttgt

SEQ ID NO: 7131 - RNA, 19 nt, synthetic construct
  source 1..19: mol_type = other RNA
tgtttggcaccgattcttg

SEQ ID NO: 7132 - RNA, 19 nt, synthetic construct
  source 1..19: mol_type = other RNA
atgtttggcaccgattctt

SEQ ID NO: 7133 - RNA, 19 nt, synthetic construct
  source 1..19: mol_type = other RNA
catgtttggcaccgattct

SEQ ID NO: 7134 - RNA, 19 nt, synthetic construct
  source 1..19: mol_type = other RNA
tcatgtttggcaccgattc

SEQ ID NO: 7135 - RNA, 19 nt, synthetic construct
  source 1..19: mol_type = other RNA
ttcatgtttggcaccgatt

SEQ ID NO: 7136 - RNA, 19 nt, synthetic construct
  source 1..19: mol_type = other RNA
gttcatgtttggcaccgat

SEQ ID NO: 7137 - RNA, 19 nt, synthetic construct
  source 1..19: mol_type = other RNA
cgttcatgtttggcaccga

SEQ ID NO: 7138 - RNA, 19 nt, synthetic construct
  source 1..19: mol_type = other RNA
ccgttcatgtttggcaccg

SEQ ID NO: 7139 - RNA, 19 nt, synthetic construct
  source 1..19: mol_type = other RNA
gccgttcatgtttggcacc

SEQ ID NO: 7140 - RNA, 19 nt, synthetic construct
  source 1..19: mol_type = other RNA
tgccgttcatgtttggcac

SEQ ID NO: 7141 - RNA, 19 nt, synthetic construct
  source 1..19: mol_type = other RNA
atgccgttcatgtttggca

SEQ ID NO: 7142 - RNA, 19 nt, synthetic construct
  source 1..19: mol_type = other RNA
tatgccgttcatgtttggc

SEQ ID NO: 7143 - RNA, 19 nt, synthetic construct
  source 1..19: mol_type = other RNA
atatgccgttcatgtttgg

SEQ ID NO: 7144 - RNA, 19 nt, synthetic construct
  source 1..19: mol_type = other RNA
aatatgccgttcatgtttg

SEQ ID NO: 7145 - RNA, 19 nt, synthetic construct
  source 1..19: mol_type = other RNA
aaatatgccgttcatgttt

SEQ ID NO: 7146 - RNA, 19 nt, synthetic construct
  source 1..19: mol_type = other RNA
aaaatatgccgttcatgtt

SEQ ID NO: 7147 - RNA, 19 nt, synthetic construct
  source 1..19: mol_type = other RNA
aaaaatatgccgttcatgt

SEQ ID NO: 7148 - RNA, 19 nt, synthetic construct
  source 1..19: mol_type = other RNA
gaaaaatatgccgttcatg

SEQ ID NO: 7149 - RNA, 19 nt, synthetic construct
  source 1..19: mol_type = other RNA
agaaaaatatgccgttcat

SEQ ID NO: 7150 - RNA, 19 nt, synthetic construct
  source 1..19: mol_type = other RNA
cagaaaaatatgccgttca

SEQ ID NO: 7151 - RNA, 19 nt, synthetic construct
  source 1..19: mol_type = other RNA
acagaaaaatatgccgttc

SEQ ID NO: 7152 - RNA, 19 nt, synthetic construct
  source 1..19: mol_type = other RNA
aacagaaaaatatgccgtt

SEQ ID NO: 7153 - RNA, 19 nt, synthetic construct
  source 1..19: mol_type = other RNA
aaacagaaaaatatgccgt

SEQ ID NO: 7154 - RNA, 19 nt, synthetic construct
  source 1..19: mol_type = other RNA
caaacagaaaaatatgccg

SEQ ID NO: 7155 - RNA, 19 nt, synthetic construct
  source 1..19: mol_type = other RNA
tcaaacagaaaaatatgcc

SEQ ID NO: 7156 - RNA, 19 nt, synthetic construct
  source 1..19: mol_type = other RNA
atcaaacagaaaaatatgc

SEQ ID NO: 7157 - RNA, 19 nt, synthetic construct
  source 1..19: mol_type = other RNA
catcaaacagaaaaatatg

SEQ ID NO: 7158 - RNA, 19 nt, synthetic construct
  source 1..19: mol_type = other RNA
ccatcaaacagaaaaatat

SEQ ID NO: 7159 - RNA, 19 nt, synthetic construct
  source 1..19: mol_type = other RNA
gccatcaaacagaaaaata

SEQ ID NO: 7160 - RNA, 19 nt, synthetic construct
  source 1..19: mol_type = other RNA
agccatcaaacagaaaaat

SEQ ID NO: 7161 - RNA, 19 nt, synthetic construct
  source 1..19: mol_type = other RNA
aagccatcaaacagaaaaa

SEQ ID NO: 7162 - RNA, 19 nt, synthetic construct
  source 1..19: mol_type = other RNA
taagccatcaaacagaaaa

SEQ ID NO: 7163 - RNA, 19 nt, synthetic construct
  source 1..19: mol_type = other RNA
ttaagccatcaaacagaaa

SEQ ID NO: 7164 - RNA, 19 nt, synthetic construct
  source 1..19: mol_type = other RNA
attaagccatcaaacagaa

SEQ ID NO: 7165 - RNA, 19 nt, synthetic construct
  source 1..19: mol_type = other RNA
cattaagccatcaaacaga

SEQ ID NO: 7166 - RNA, 19 nt, synthetic construct
  source 1..19: mol_type = other RNA
tcattaagccatcaaacag

SEQ ID NO: 7167 - RNA, 19 nt, synthetic construct
  source 1..19: mol_type = other RNA
atcattaagccatcaaaca

SEQ ID NO: 7168 - RNA, 19 nt, synthetic construct
  source 1..19: mol_type = other RNA
gatcattaagccatcaaac

SEQ ID NO: 7169 - RNA, 19 nt, synthetic construct
  source 1..19: mol_type = other RNA
tgatcattaagccatcaaa

SEQ ID NO: 7170 - RNA, 19 nt, synthetic construct
  source 1..19: mol_type = other RNA
ctgatcattaagccatcaa

SEQ ID NO: 7171 - RNA, 19 nt, synthetic construct
  source 1..19: mol_type = other RNA
actgatcattaagccatca

SEQ ID NO: 7172 - RNA, 19 nt, synthetic construct
  source 1..19: mol_type = other RNA
aactgatcattaagccatc

SEQ ID NO: 7173 - RNA, 19 nt, synthetic construct
  source 1..19: mol_type = other RNA
caactgatcattaagccat

SEQ ID NO: 7174 - RNA, 19 nt, synthetic construct
  source 1..19: mol_type = other RNA
acaactgatcattaagcca

SEQ ID NO: 7175 - RNA, 19 nt, synthetic construct
  source 1..19: mol_type = other RNA
tacaactgatcattaagcc

SEQ ID NO: 7176 - RNA, 19 nt, synthetic construct
  source 1..19: mol_type = other RNA
ttacaactgatcattaagc

SEQ ID NO: 7177 - RNA, 19 nt, synthetic construct
  source 1..19: mol_type = other RNA
tttacaactgatcattaag

SEQ ID NO: 7178 - RNA, 19 nt, synthetic construct
  source 1..19: mol_type = other RNA
gtttacaactgatcattaa

SEQ ID NO: 7179 - RNA, 19 nt, synthetic construct
  source 1..19: mol_type = other RNA
ggtttacaactgatcatta

SEQ ID NO: 7180 - RNA, 19 nt, synthetic construct
  source 1..19: mol_type = other RNA
aggtttacaactgatcatt

SEQ ID NO: 7181 - RNA, 19 nt, synthetic construct
  source 1..19: mol_type = other RNA
taggtttacaactgatcat

SEQ ID NO: 7182 - RNA, 19 nt, synthetic construct
  source 1..19: mol_type = other RNA
ttaggtttacaactgatca

SEQ ID NO: 7183 - RNA, 19 nt, synthetic construct
  source 1..19: mol_type = other RNA
attaggtttacaactgatc

SEQ ID NO: 7184 - RNA, 19 nt, synthetic construct
  source 1..19: mol_type = other RNA
gattaggtttacaactgat

SEQ ID NO: 7185 - RNA, 19 nt, synthetic construct
  source 1..19: mol_type = other RNA
tgattaggtttacaactga

SEQ ID NO: 7186 - RNA, 19 nt, synthetic construct
  source 1..19: mol_type = other RNA
atgattaggtttacaactg

SEQ ID NO: 7187 - RNA, 19 nt, synthetic construct
  source 1..19: mol_type = other RNA
catgattaggtttacaact

SEQ ID NO: 7188 - RNA, 19 nt, synthetic construct
  source 1..19: mol_type = other RNA
ccatgattaggtttacaac

SEQ ID NO: 7189 - RNA, 19 nt, synthetic construct
  source 1..19: mol_type = other RNA
gccatgattaggtttacaa

SEQ ID NO: 7190 - RNA, 19 nt, synthetic construct
  source 1..19: mol_type = other RNA
ggccatgattaggtttaca

SEQ ID NO: 7191 - RNA, 19 nt, synthetic construct
  source 1..19: mol_type = other RNA
tggccatgattaggtttac

SEQ ID NO: 7192 - RNA, 19 nt, synthetic construct
  source 1..19: mol_type = other RNA
ctggccatgattaggttta

SEQ ID NO: 7193 - RNA, 19 nt, synthetic construct
  source 1..19: mol_type = other RNA
tctggccatgattaggttt

SEQ ID NO: 7194 - RNA, 19 nt, synthetic construct
  source 1..19: mol_type = other RNA
gtctggccatgattaggtt

SEQ ID NO: 7195 - RNA, 19 nt, synthetic construct
  source 1..19: mol_type = other RNA
agtctggccatgattaggt

SEQ ID NO: 7196 - RNA, 19 nt, synthetic construct
  source 1..19: mol_type = other RNA
gagtctggccatgattagg

SEQ ID NO: 7197 - RNA, 19 nt, synthetic construct
  source 1..19: mol_type = other RNA
cgagtctggccatgattag

SEQ ID NO: 7198 - RNA, 19 nt, synthetic construct
  source 1..19: mol_type = other RNA
ccgagtctggccatgatta

SEQ ID NO: 7199 - RNA, 19 nt, synthetic construct
  source 1..19: mol_type = other RNA
gccgagtctggccatgatt

SEQ ID NO: 7200 - RNA, 19 nt, synthetic construct
  source 1..19: mol_type = other RNA
agccgagtctggccatgat

SEQ ID NO: 7201 - RNA, 19 nt, synthetic construct
  source 1..19: mol_type = other RNA
aagccgagtctggccatga

SEQ ID NO: 7202 - RNA, 19 nt, synthetic construct
  source 1..19: mol_type = other RNA
gaagccgagtctggccatg

SEQ ID NO: 7203 - RNA, 19 nt, synthetic construct
  source 1..19: mol_type = other RNA
ggaagccgagtctggccat

SEQ ID NO: 7204 - RNA, 19 nt, synthetic construct
  source 1..19: mol_type = other RNA
tggaagccgagtctggcca

SEQ ID NO: 7205 - RNA, 19 nt, synthetic construct
  source 1..19: mol_type = other RNA
ctggaagccgagtctggcc

SEQ ID NO: 7206 - RNA, 19 nt, synthetic construct
  source 1..19: mol_type = other RNA
cctggaagccgagtctggc

SEQ ID NO: 7207 - RNA, 19 nt, synthetic construct
  source 1..19: mol_type = other RNA
acctggaagccgagtctgg

SEQ ID NO: 7208 - RNA, 19 nt, synthetic construct
  source 1..19: mol_type = other RNA
aacctggaagccgagtctg

SEQ ID NO: 7209 - RNA, 19 nt, synthetic construct
  source 1..19: mol_type = other RNA
taacctggaagccgagtct

SEQ ID NO: 7210 - RNA, 19 nt, synthetic construct
  source 1..19: mol_type = other RNA
gtaacctggaagccgagtc

SEQ ID NO: 7211 - RNA, 19 nt, synthetic construct
  source 1..19: mol_type = other RNA
tgtaacctggaagccgagt

SEQ ID NO: 7212 - RNA, 19 nt, synthetic construct
  source 1..19: mol_type = other RNA
ctgtaacctggaagccgag

SEQ ID NO: 7213 - RNA, 19 nt, synthetic construct
  source 1..19: mol_type = other RNA
actgtaacctggaagccga

SEQ ID NO: 7214 - RNA, 19 nt, synthetic construct
  source 1..19: mol_type = other RNA
tactgtaacctggaagccg

SEQ ID NO: 7215 - RNA, 19 nt, synthetic construct
  source 1..19: mol_type = other RNA
ctactgtaacctggaagcc

SEQ ID NO: 7216 - RNA, 19 nt, synthetic construct
  source 1..19: mol_type = other RNA
actactgtaacctggaagc

SEQ ID NO: 7217 - RNA, 19 nt, synthetic construct
  source 1..19: mol_type = other RNA
cactactgtaacctggaag

SEQ ID NO: 7218 - RNA, 19 nt, synthetic construct
  source 1..19: mol_type = other RNA
gcactactgtaacctggaa

SEQ ID NO: 7219 - RNA, 19 nt, synthetic construct
  source 1..19: mol_type = other RNA
tgcactactgtaacctgga

SEQ ID NO: 7220 - RNA, 19 nt, synthetic construct
  source 1..19: mol_type = other RNA
ctgcactactgtaacctgg

SEQ ID NO: 7221 - RNA, 19 nt, synthetic construct
  source 1..19: mol_type = other RNA
tctgcactactgtaacctg

SEQ ID NO: 7222 - RNA, 19 nt, synthetic construct
  source 1..19: mol_type = other RNA
ttctgcactactgtaacct

SEQ ID NO: 7223 - RNA, 19 nt, synthetic construct
  source 1..19: mol_type = other RNA
attctgcactactgtaacc

SEQ ID NO: 7224 - RNA, 19 nt, synthetic construct
  source 1..19: mol_type = other RNA
tattctgcactactgtaac

SEQ ID NO: 7225 - RNA, 19 nt, synthetic construct
  source 1..19: mol_type = other RNA
gtattctgcactactgtaa

SEQ ID NO: 7226 - RNA, 19 nt, synthetic construct
  source 1..19: mol_type = other RNA
tgtattctgcactactgta

SEQ ID NO: 7227 - RNA, 19 nt, synthetic construct
  source 1..19: mol_type = other RNA
ctgtattctgcactactgt

SEQ ID NO: 7228 - RNA, 19 nt, synthetic construct
  source 1..19: mol_type = other RNA
cctgtattctgcactactg

SEQ ID NO: 7229 - RNA, 19 nt, synthetic construct
  source 1..19: mol_type = other RNA
acctgtattctgcactact

SEQ ID NO: 7230 - RNA, 19 nt, synthetic construct
  source 1..19: mol_type = other RNA
aacctgtattctgcactac

SEQ ID NO: 7231 - RNA, 19 nt, synthetic construct
  source 1..19: mol_type = other RNA
taacctgtattctgcacta

SEQ ID NO: 7232 - RNA, 19 nt, synthetic construct
  source 1..19: mol_type = other RNA
ttaacctgtattctgcact

SEQ ID NO: 7233 - RNA, 19 nt, synthetic construct
  source 1..19: mol_type = other RNA
tttaacctgtattctgcac

SEQ ID NO: 7234 - RNA, 19 nt, synthetic construct
  source 1..19: mol_type = other RNA
ttttaacctgtattctgca

SEQ ID NO: 7235 - RNA, 19 nt, synthetic construct
  source 1..19: mol_type = other RNA
cttttaacctgtattctgc

SEQ ID NO: 7236 - RNA, 19 nt, synthetic construct
  source 1..19: mol_type = other RNA
tcttttaacctgtattctg

SEQ ID NO: 7237 - RNA, 19 nt, synthetic construct
  source 1..19: mol_type = other RNA
ttcttttaacctgtattct

SEQ ID NO: 7238 - RNA, 19 nt, synthetic construct
  source 1..19: mol_type = other RNA
tttcttttaacctgtattc

SEQ ID NO: 7239 - RNA, 19 nt, synthetic construct
  source 1..19: mol_type = other RNA
ttttcttttaacctgtatt

SEQ ID NO: 7240 - RNA, 19 nt, synthetic construct
  source 1..19: mol_type = other RNA
tttttcttttaacctgtat

SEQ ID NO: 7241 - RNA, 19 nt, synthetic construct
  source 1..19: mol_type = other RNA
atttttcttttaacctgta

SEQ ID NO: 7242 - RNA, 19 nt, synthetic construct
  source 1..19: mol_type = other RNA
aatttttcttttaacctgt

SEQ ID NO: 7243 - RNA, 19 nt, synthetic construct
  source 1..19: mol_type = other RNA
aaatttttcttttaacctg

SEQ ID NO: 7244 - RNA, 19 nt, synthetic construct
  source 1..19: mol_type = other RNA
caaatttttcttttaacct

SEQ ID NO: 7245 - RNA, 19 nt, synthetic construct
  source 1..19: mol_type = other RNA
acaaatttttcttttaacc

SEQ ID NO: 7246 - RNA, 19 nt, synthetic construct
  source 1..19: mol_type = other RNA
gacaaatttttcttttaac

SEQ ID NO: 7247 - RNA, 19 nt, synthetic construct
  source 1..19: mol_type = other RNA
tgacaaatttttcttttaa

SEQ ID NO: 7248 - RNA, 19 nt, synthetic construct
  source 1..19: mol_type = other RNA
atgacaaatttttctttta

SEQ ID NO: 7249 - RNA, 19 nt, synthetic construct
  source 1..19: mol_type = other RNA
catgacaaatttttctttt

SEQ ID NO: 7250 - RNA, 19 nt, synthetic construct
  source 1..19: mol_type = other RNA
tcatgacaaatttttcttt

SEQ ID NO: 7251 - RNA, 19 nt, synthetic construct
  source 1..19: mol_type = other RNA
ctcatgacaaatttttctt

SEQ ID NO: 7252 - RNA, 19 nt, synthetic construct
  source 1..19: mol_type = other RNA
cctcatgacaaatttttct

SEQ ID NO: 7253 - RNA, 19 nt, synthetic construct
  source 1..19: mol_type = other RNA
tcctcatgacaaatttttc

SEQ ID NO: 7254 - RNA, 19 nt, synthetic construct
  source 1..19: mol_type = other RNA
ttcctcatgacaaattttt

SEQ ID NO: 7255 - RNA, 19 nt, synthetic construct
  source 1..19: mol_type = other RNA
tttcctcatgacaaatttt

SEQ ID NO: 7256 - RNA, 19 nt, synthetic construct
  source 1..19: mol_type = other RNA
ttttcctcatgacaaattt

SEQ ID NO: 7257 - RNA, 19 nt, synthetic construct
  source 1..19: mol_type = other RNA
attttcctcatgacaaatt

SEQ ID NO: 7258 - RNA, 19 nt, synthetic construct
  source 1..19: mol_type = other RNA
tattttcctcatgacaaat

SEQ ID NO: 7259 - RNA, 19 nt, synthetic construct
  source 1..19: mol_type = other RNA
gtattttcctcatgacaaa

SEQ ID NO: 7260 - RNA, 19 nt, synthetic construct
  source 1..19: mol_type = other RNA
tgtattttcctcatgacaa

SEQ ID NO: 7261 - RNA, 19 nt, synthetic construct
  source 1..19: mol_type = other RNA
ttgtattttcctcatgaca

SEQ ID NO: 7262 - RNA, 19 nt, synthetic construct
  source 1..19: mol_type = other RNA
tttgtattttcctcatgac

SEQ ID NO: 7263 - RNA, 19 nt, synthetic construct
  source 1..19: mol_type = other RNA
atttgtattttcctcatga

SEQ ID NO: 7264 - RNA, 19 nt, synthetic construct
  source 1..19: mol_type = other RNA
aatttgtattttcctcatg

SEQ ID NO: 7265 - RNA, 19 nt, synthetic construct
  source 1..19: mol_type = other RNA
aaatttgtattttcctcat

SEQ ID NO: 7266 - RNA, 19 nt, synthetic construct
  source 1..19: mol_type = other RNA
caaatttgtattttcctca

SEQ ID NO: 7267 - RNA, 19 nt, synthetic construct
  source 1..19: mol_type = other RNA
acaaatttgtattttcctc

SEQ ID NO: 7268 - RNA, 19 nt, synthetic construct
  source 1..19: mol_type = other RNA
cacaaatttgtattttcct

SEQ ID NO: 7269 - RNA, 19 nt, synthetic construct
  source 1..19: mol_type = other RNA
tcacaaatttgtattttcc

SEQ ID NO: 7270 - RNA, 19 nt, synthetic construct
  source 1..19: mol_type = other RNA
atcacaaatttgtattttc

SEQ ID NO: 7271 - RNA, 19 nt, synthetic construct
  source 1..19: mol_type = other RNA
tatcacaaatttgtatttt

SEQ ID NO: 7272 - RNA, 19 nt, synthetic construct
  source 1..19: mol_type = other RNA
ttatcacaaatttgtattt

SEQ ID NO: 7273 - RNA, 19 nt, synthetic construct
  source 1..19: mol_type = other RNA
tttatcacaaatttgtatt

SEQ ID NO: 7274 - RNA, 19 nt, synthetic construct
  source 1..19: mol_type = other RNA
ctttatcacaaatttgtat

SEQ ID NO: 7275 - RNA, 19 nt, synthetic construct
  source 1..19: mol_type = other RNA
tctttatcacaaatttgta

SEQ ID NO: 7276 - RNA, 19 nt, synthetic construct
  source 1..19: mol_type = other RNA
ttctttatcacaaatttgt

SEQ ID NO: 7277 - RNA, 19 nt, synthetic construct
  source 1..19: mol_type = other RNA
cttctttatcacaaatttg

SEQ ID NO: 7278 - RNA, 19 nt, synthetic construct
  source 1..19: mol_type = other RNA
tcttctttatcacaaattt

SEQ ID NO: 7279 - RNA, 19 nt, synthetic construct
  source 1..19: mol_type = other RNA
atcttctttatcacaaatt

SEQ ID NO: 7280 - RNA, 19 nt, synthetic construct
  source 1..19: mol_type = other RNA
tatcttctttatcacaaat

SEQ ID NO: 7281 - RNA, 19 nt, synthetic construct
  source 1..19: mol_type = other RNA
gtatcttctttatcacaaa

SEQ ID NO: 7282 - RNA, 19 nt, synthetic construct
  source 1..19: mol_type = other RNA
agtatcttctttatcacaa

SEQ ID NO: 7283 - RNA, 19 nt, synthetic construct
  source 1..19: mol_type = other RNA
aagtatcttctttatcaca

SEQ ID NO: 7284 - RNA, 19 nt, synthetic construct
  source 1..19: mol_type = other RNA
caagtatcttctttatcac

SEQ ID NO: 7285 - RNA, 19 nt, synthetic construct
  source 1..19: mol_type = other RNA
acaagtatcttctttatca

SEQ ID NO: 7286 - RNA, 19 nt, synthetic construct
  source 1..19: mol_type = other RNA
cacaagtatcttctttatc

SEQ ID NO: 7287 - RNA, 19 nt, synthetic construct
  source 1..19: mol_type = other RNA
tcacaagtatcttctttat

SEQ ID NO: 7288 - RNA, 19 nt, synthetic construct
  source 1..19: mol_type = other RNA
ctcacaagtatcttcttta

SEQ ID NO: 7289 - RNA, 19 nt, synthetic construct
  source 1..19: mol_type = other RNA
gctcacaagtatcttcttt

SEQ ID NO: 7290 - RNA, 19 nt, synthetic construct
  source 1..19: mol_type = other RNA
tgctcacaagtatcttctt

SEQ ID NO: 7291 - RNA, 19 nt, synthetic construct
  source 1..19: mol_type = other RNA
gtgctcacaagtatcttct

SEQ ID NO: 7292 - RNA, 19 nt, synthetic construct
  source 1..19: mol_type = other RNA
tgtgctcacaagtatcttc

SEQ ID NO: 7293 - RNA, 19 nt, synthetic construct
  source 1..19: mol_type = other RNA
ttgtgctcacaagtatctt

SEQ ID NO: 7294 - RNA, 19 nt, synthetic construct
  source 1..19: mol_type = other RNA
cttgtgctcacaagtatct

SEQ ID NO: 7295 - RNA, 19 nt, synthetic construct
  source 1..19: mol_type = other RNA
gcttgtgctcacaagtatc

SEQ ID NO: 7296 - RNA, 19 nt, synthetic construct
  source 1..19: mol_type = other RNA
tgcttgtgctcacaagtat

SEQ ID NO: 7297 - RNA, 19 nt, synthetic construct
  source 1..19: mol_type = other RNA
atgcttgtgctcacaagta

SEQ ID NO: 7298 - RNA, 19 nt, synthetic construct
  source 1..19: mol_type = other RNA
catgcttgtgctcacaagt

SEQ ID NO: 7299 - RNA, 19 nt, synthetic construct
  source 1..19: mol_type = other RNA
gcatgcttgtgctcacaag

SEQ ID NO: 7300 - RNA, 19 nt, synthetic construct
  source 1..19: mol_type = other RNA
tgcatgcttgtgctcacaa

SEQ ID NO: 7301 - RNA, 19 nt, synthetic construct
  source 1..19: mol_type = other RNA
atgcatgcttgtgctcaca

SEQ ID NO: 7302 - RNA, 19 nt, synthetic construct
  source 1..19: mol_type = other RNA
aatgcatgcttgtgctcac

SEQ ID NO: 7303 - RNA, 19 nt, synthetic construct
  source 1..19: mol_type = other RNA
aaatgcatgcttgtgctca

SEQ ID NO: 7304 - RNA, 19 nt, synthetic construct
  source 1..19: mol_type = other RNA
caaatgcatgcttgtgctc

SEQ ID NO: 7305 - RNA, 19 nt, synthetic construct
  source 1..19: mol_type = other RNA
tcaaatgcatgcttgtgct

SEQ ID NO: 7306 - RNA, 19 nt, synthetic construct
  source 1..19: mol_type = other RNA
ttcaaatgcatgcttgtgc

SEQ ID NO: 7307 - RNA, 19 nt, synthetic construct
  source 1..19: mol_type = other RNA
attcaaatgcatgcttgtg

SEQ ID NO: 7308 - RNA, 19 nt, synthetic construct
  source 1..19: mol_type = other RNA
aattcaaatgcatgcttgt

SEQ ID NO: 7309 - RNA, 19 nt, synthetic construct
  source 1..19: mol_type = other RNA
taattcaaatgcatgcttg

SEQ ID NO: 7310 - RNA, 19 nt, synthetic construct
  source 1..19: mol_type = other RNA
ctaattcaaatgcatgctt

SEQ ID NO: 7311 - RNA, 19 nt, synthetic construct
  source 1..19: mol_type = other RNA
actaattcaaatgcatgct

SEQ ID NO: 7312 - RNA, 19 nt, synthetic construct
  source 1..19: mol_type = other RNA
tactaattcaaatgcatgc

SEQ ID NO: 7313 - RNA, 19 nt, synthetic construct
  source 1..19: mol_type = other RNA
atactaattcaaatgcatg

SEQ ID NO: 7314 - RNA, 19 nt, synthetic construct
  source 1..19: mol_type = other RNA
gatactaattcaaatgcat

SEQ ID NO: 7315 - RNA, 19 nt, synthetic construct
  source 1..19: mol_type = other RNA
ggatactaattcaaatgca

SEQ ID NO: 7316 - RNA, 19 nt, synthetic construct
  source 1..19: mol_type = other RNA
tggatactaattcaaatgc

SEQ ID NO: 7317 - RNA, 19 nt, synthetic construct
  source 1..19: mol_type = other RNA
ttggatactaattcaaatg

SEQ ID NO: 7318 - RNA, 19 nt, synthetic construct
  source 1..19: mol_type = other RNA
tttggatactaattcaaat

SEQ ID NO: 7319 - RNA, 19 nt, synthetic construct
  source 1..19: mol_type = other RNA
ctttggatactaattcaaa

SEQ ID NO: 7320 - RNA, 19 nt, synthetic construct
  source 1..19: mol_type = other RNA
tctttggatactaattcaa

SEQ ID NO: 7321 - RNA, 19 nt, synthetic construct
  source 1..19: mol_type = other RNA
atctttggatactaattca

SEQ ID NO: 7322 - RNA, 19 nt, synthetic construct
  source 1..19: mol_type = other RNA
catctttggatactaattc

SEQ ID NO: 7323 - RNA, 19 nt, synthetic construct
  source 1..19: mol_type = other RNA
tcatctttggatactaatt

SEQ ID NO: 7324 - RNA, 19 nt, synthetic construct
  source 1..19: mol_type = other RNA
ctcatctttggatactaat

SEQ ID NO: 7325 - RNA, 19 nt, synthetic construct
  source 1..19: mol_type = other RNA
tctcatctttggatactaa

SEQ ID NO: 7326 - RNA, 19 nt, synthetic construct
  source 1..19: mol_type = other RNA
ttctcatctttggatacta

SEQ ID NO: 7327 - RNA, 19 nt, synthetic construct
  source 1..19: mol_type = other RNA
gttctcatctttggatact

SEQ ID NO: 7328 - RNA, 19 nt, synthetic construct
  source 1..19: mol_type = other RNA
tgttctcatctttggatac

SEQ ID NO: 7329 - RNA, 19 nt, synthetic construct
  source 1..19: mol_type = other RNA
ctgttctcatctttggata

SEQ ID NO: 7330 - RNA, 19 nt, synthetic construct
  source 1..19: mol_type = other RNA
gctgttctcatctttggat

SEQ ID NO: 7331 - RNA, 19 nt, synthetic construct
  source 1..19: mol_type = other RNA
tgctgttctcatctttgga

SEQ ID NO: 7332 - RNA, 19 nt, synthetic construct
  source 1..19: mol_type = other RNA
atgctgttctcatctttgg

SEQ ID NO: 7333 - RNA, 19 nt, synthetic construct
  source 1..19: mol_type = other RNA
tatgctgttctcatctttg

SEQ ID NO: 7334 - RNA, 19 nt, synthetic construct
  source 1..19: mol_type = other RNA
ttatgctgttctcatcttt

SEQ ID NO: 7335 - RNA, 19 nt, synthetic construct
  source 1..19: mol_type = other RNA
attatgctgttctcatctt

SEQ ID NO: 7336 - RNA, 19 nt, synthetic construct
  source 1..19: mol_type = other RNA
tattatgctgttctcatct

SEQ ID NO: 7337 - RNA, 19 nt, synthetic construct
  source 1..19: mol_type = other RNA
atattatgctgttctcatc

SEQ ID NO: 7338 - RNA, 19 nt, synthetic construct
  source 1..19: mol_type = other RNA
aatattatgctgttctcat

SEQ ID NO: 7339 - RNA, 19 nt, synthetic construct
  source 1..19: mol_type = other RNA
aaatattatgctgttctca

SEQ ID NO: 7340 - RNA, 19 nt, synthetic construct
  source 1..19: mol_type = other RNA
caaatattatgctgttctc

SEQ ID NO: 7341 - RNA, 19 nt, synthetic construct
  source 1..19: mol_type = other RNA
gcaaatattatgctgttct

SEQ ID NO: 7342 - RNA, 19 nt, synthetic construct
  source 1..19: mol_type = other RNA
agcaaatattatgctgttc

SEQ ID NO: 7343 - RNA, 19 nt, synthetic construct
  source 1..19: mol_type = other RNA
cagcaaatattatgctgtt

SEQ ID NO: 7344 - RNA, 19 nt, synthetic construct
  source 1..19: mol_type = other RNA
gcagcaaatattatgctgt

SEQ ID NO: 7345 - RNA, 19 nt, synthetic construct
  source 1..19: mol_type = other RNA
agcagcaaatattatgctg

SEQ ID NO: 7346 - RNA, 19 nt, synthetic construct
  source 1..19: mol_type = other RNA
tagcagcaaatattatgct

SEQ ID NO: 7347 - RNA, 19 nt, synthetic construct
  source 1..19: mol_type = other RNA
ttagcagcaaatattatgc

SEQ ID NO: 7348 - RNA, 19 nt, synthetic construct
  source 1..19: mol_type = other RNA
cttagcagcaaatattatg

SEQ ID NO: 7349 - RNA, 19 nt, synthetic construct
  source 1..19: mol_type = other RNA
acttagcagcaaatattat

SEQ ID NO: 7350 - RNA, 19 nt, synthetic construct
  source 1..19: mol_type = other RNA
gacttagcagcaaatatta

SEQ ID NO: 7351 - RNA, 19 nt, synthetic construct
  source 1..19: mol_type = other RNA
agacttagcagcaaatatt

SEQ ID NO: 7352 - RNA, 19 nt, synthetic construct
  source 1..19: mol_type = other RNA
cagacttagcagcaaatat

SEQ ID NO: 7353 - RNA, 19 nt, synthetic construct
  source 1..19: mol_type = other RNA
gcagacttagcagcaaata

SEQ ID NO: 7354 - RNA, 19 nt, synthetic construct
  source 1..19: mol_type = other RNA
agcagacttagcagcaaat

SEQ ID NO: 7355 - RNA, 19 nt, synthetic construct
  source 1..19: mol_type = other RNA
cagcagacttagcagcaaa

SEQ ID NO: 7356 - RNA, 19 nt, synthetic construct
  source 1..19: mol_type = other RNA
tcagcagacttagcagcaa

SEQ ID NO: 7357 - RNA, 19 nt, synthetic construct
  source 1..19: mol_type = other RNA
ttcagcagacttagcagca

SEQ ID NO: 7358 - RNA, 19 nt, synthetic construct
  source 1..19: mol_type = other RNA
cttcagcagacttagcagc

SEQ ID NO: 7359 - RNA, 19 nt, synthetic construct
  source 1..19: mol_type = other RNA
tcttcagcagacttagcag

SEQ ID NO: 7360 - RNA, 19 nt, synthetic construct
  source 1..19: mol_type = other RNA
ttcttcagcagacttagca

SEQ ID NO: 7361 - RNA, 19 nt, synthetic construct
  source 1..19: mol_type = other RNA
tttcttcagcagacttagc

SEQ ID NO: 7362 - RNA, 19 nt, synthetic construct
  source 1..19: mol_type = other RNA
ttttcttcagcagacttag

SEQ ID NO: 7363 - RNA, 19 nt, synthetic construct
  source 1..19: mol_type = other RNA
tttttcttcagcagactta

SEQ ID NO: 7364 - RNA, 19 nt, synthetic construct
  source 1..19: mol_type = other RNA
ttttttcttcagcagactt

SEQ ID NO: 7365 - RNA, 19 nt, synthetic construct
  source 1..19: mol_type = other RNA
tttttttcttcagcagact

SEQ ID NO: 7366 - RNA, 19 nt, synthetic construct
  source 1..19: mol_type = other RNA
gtttttttcttcagcagac

SEQ ID NO: 7367 - RNA, 19 nt, synthetic construct
  source 1..19: mol_type = other RNA
tgtttttttcttcagcaga

SEQ ID NO: 7368 - RNA, 19 nt, synthetic construct
  source 1..19: mol_type = other RNA
ttgtttttttcttcagcag

SEQ ID NO: 7369 - RNA, 19 nt, synthetic construct
  source 1..19: mol_type = other RNA
gttgtttttttcttcagca

SEQ ID NO: 7370 - RNA, 19 nt, synthetic construct
  source 1..19: mol_type = other RNA
agttgtttttttcttcagc

SEQ ID NO: 7371 - RNA, 19 nt, synthetic construct
  source 1..19: mol_type = other RNA
cagttgtttttttcttcag

SEQ ID NO: 7372 - RNA, 19 nt, synthetic construct
  source 1..19: mol_type = other RNA
ccagttgtttttttcttca

SEQ ID NO: 7373 - RNA, 19 nt, synthetic construct
  source 1..19: mol_type = other RNA
tccagttgtttttttcttc

SEQ ID NO: 7374 - RNA, 19 nt, synthetic construct
  source 1..19: mol_type = other RNA
atccagttgtttttttctt

SEQ ID NO: 7375 - RNA, 19 nt, synthetic construct
  source 1..19: mol_type = other RNA
catccagttgtttttttct

SEQ ID NO: 7376 - RNA, 19 nt, synthetic construct
  source 1..19: mol_type = other RNA
ccatccagttgtttttttc

SEQ ID NO: 7377 - RNA, 19 nt, synthetic construct
  source 1..19: mol_type = other RNA
gccatccagttgttttttt

SEQ ID NO: 7378 - RNA, 19 nt, synthetic construct
  source 1..19: mol_type = other RNA
tgccatccagttgtttttt

SEQ ID NO: 7379 - RNA, 19 nt, synthetic construct
  source 1..19: mol_type = other RNA
ctgccatccagttgttttt

SEQ ID NO: 7380 - RNA, 19 nt, synthetic construct
  source 1..19: mol_type = other RNA
gctgccatccagttgtttt

SEQ ID NO: 7381 - RNA, 19 nt, synthetic construct
  source 1..19: mol_type = other RNA
ggctgccatccagttgttt

SEQ ID NO: 7382 - RNA, 19 nt, synthetic construct
  source 1..19: mol_type = other RNA
gggctgccatccagttgtt

SEQ ID NO: 7383 - RNA, 19 nt, synthetic construct
  source 1..19: mol_type = other RNA
agggctgccatccagttgt

SEQ ID NO: 7384 - RNA, 19 nt, synthetic construct
  source 1..19: mol_type = other RNA
aagggctgccatccagttg

SEQ ID NO: 7385 - RNA, 19 nt, synthetic construct
  source 1..19: mol_type = other RNA
taagggctgccatccagtt

SEQ ID NO: 7386 - RNA, 19 nt, synthetic construct
  source 1..19: mol_type = other RNA
ataagggctgccatccagt

SEQ ID NO: 7387 - RNA, 19 nt, synthetic construct
  source 1..19: mol_type = other RNA
aataagggctgccatccag

SEQ ID NO: 7388 - RNA, 19 nt, synthetic construct
  source 1..19: mol_type = other RNA
aaataagggctgccatcca

SEQ ID NO: 7389 - RNA, 19 nt, synthetic construct
  source 1..19: mol_type = other RNA
gaaataagggctgccatcc

SEQ ID NO: 7390 - RNA, 19 nt, synthetic construct
  source 1..19: mol_type = other RNA
agaaataagggctgccatc

SEQ ID NO: 7391 - RNA, 19 nt, synthetic construct
  source 1..19: mol_type = other RNA
gagaaataagggctgccat

SEQ ID NO: 7392 - RNA, 19 nt, synthetic construct
  source 1..19: mol_type = other RNA
agagaaataagggctgcca

SEQ ID NO: 7393 - RNA, 19 nt, synthetic construct
  source 1..19: mol_type = other RNA
aagagaaataagggctgcc

SEQ ID NO: 7394 - RNA, 19 nt, synthetic construct
  source 1..19: mol_type = other RNA
gaagagaaataagggctgc

SEQ ID NO: 7395 - RNA, 19 nt, synthetic construct
  source 1..19: mol_type = other RNA
tgaagagaaataagggctg

SEQ ID NO: 7396 - RNA, 19 nt, synthetic construct
  source 1..19: mol_type = other RNA
atgaagagaaataagggct

SEQ ID NO: 7397 - RNA, 19 nt, synthetic construct
  source 1..19: mol_type = other RNA
aatgaagagaaataagggc

SEQ ID NO: 7398 - RNA, 19 nt, synthetic construct
  source 1..19: mol_type = other RNA
taatgaagagaaataaggg

SEQ ID NO: 7399 - RNA, 19 nt, synthetic construct
  source 1..19: mol_type = other RNA
ataatgaagagaaataagg

SEQ ID NO: 7400 - RNA, 19 nt, synthetic construct
  source 1..19: mol_type = other RNA
gataatgaagagaaataag

SEQ ID NO: 7401 - RNA, 19 nt, synthetic construct
  source 1..19: mol_type = other RNA
cgataatgaagagaaataa

SEQ ID NO: 7402 - RNA, 19 nt, synthetic construct
  source 1..19: mol_type = other RNA
acgataatgaagagaaata

SEQ ID NO: 7403 - RNA, 19 nt, synthetic construct
  source 1..19: mol_type = other RNA
tacgataatgaagagaaat

SEQ ID NO: 7404 - RNA, 19 nt, synthetic construct
  source 1..19: mol_type = other RNA
ctacgataatgaagagaaa

SEQ ID NO: 7405 - RNA, 19 nt, synthetic construct
  source 1..19: mol_type = other RNA
actacgataatgaagagaa

SEQ ID NO: 7406 - RNA, 19 nt, synthetic construct
  source 1..19: mol_type = other RNA
tactacgataatgaagaga

SEQ ID NO: 7407 - RNA, 19 nt, synthetic construct
  source 1..19: mol_type = other RNA
gtactacgataatgaagag

SEQ ID NO: 7408 - RNA, 19 nt, synthetic construct
  source 1..19: mol_type = other RNA
agtactacgataatgaaga

SEQ ID NO: 7409 - RNA, 19 nt, synthetic construct
  source 1..19: mol_type = other RNA
gagtactacgataatgaag

SEQ ID NO: 7410 - RNA, 19 nt, synthetic construct
  source 1..19: mol_type = other RNA
agagtactacgataatgaa

SEQ ID NO: 7411 - RNA, 19 nt, synthetic construct
  source 1..19: mol_type = other RNA
tagagtactacgataatga

SEQ ID NO: 7412 - RNA, 19 nt, synthetic construct
  source 1..19: mol_type = other RNA
ctagagtactacgataatg

SEQ ID NO: 7413 - RNA, 19 nt, synthetic construct
  source 1..19: mol_type = other RNA
tctagagtactacgataat

SEQ ID NO: 7414 - RNA, 19 nt, synthetic construct
  source 1..19: mol_type = other RNA
atctagagtactacgataa

SEQ ID NO: 7415 - RNA, 19 nt, synthetic construct
  source 1..19: mol_type = other RNA
gatctagagtactacgata

SEQ ID NO: 7416 - RNA, 19 nt, synthetic construct
  source 1..19: mol_type = other RNA
cgatctagagtactacgat

SEQ ID NO: 7417 - RNA, 19 nt, synthetic construct
  source 1..19: mol_type = other RNA
tcgatctagagtactacga

SEQ ID NO: 7418 - RNA, 19 nt, synthetic construct
  source 1..19: mol_type = other RNA
ttcgatctagagtactacg

SEQ ID NO: 7419 - RNA, 19 nt, synthetic construct
  source 1..19: mol_type = other RNA
attcgatctagagtactac

SEQ ID NO: 7420 - RNA, 19 nt, synthetic construct
  source 1..19: mol_type = other RNA
cattcgatctagagtacta

SEQ ID NO: 7421 - RNA, 19 nt, synthetic construct
  source 1..19: mol_type = other RNA
acattcgatctagagtact

SEQ ID NO: 7422 - RNA, 19 nt, synthetic construct
  source 1..19: mol_type = other RNA
aacattcgatctagagtac

SEQ ID NO: 7423 - RNA, 19 nt, synthetic construct
  source 1..19: mol_type = other RNA
taacattcgatctagagta

SEQ ID NO: 7424 - RNA, 19 nt, synthetic construct
  source 1..19: mol_type = other RNA
ctaacattcgatctagagt

SEQ ID NO: 7425 - RNA, 19 nt, synthetic construct
  source 1..19: mol_type = other RNA
tctaacattcgatctagag

SEQ ID NO: 7426 - RNA, 19 nt, synthetic construct
  source 1..19: mol_type = other RNA
atctaacattcgatctaga

SEQ ID NO: 7427 - RNA, 19 nt, synthetic construct
  source 1..19: mol_type = other RNA
aatctaacattcgatctag

SEQ ID NO: 7428 - RNA, 19 nt, synthetic construct
  source 1..19: mol_type = other RNA
gaatctaacattcgatcta

SEQ ID NO: 7429 - RNA, 19 nt, synthetic construct
  source 1..19: mol_type = other RNA
tgaatctaacattcgatct

SEQ ID NO: 7430 - RNA, 19 nt, synthetic construct
  source 1..19: mol_type = other RNA
ctgaatctaacattcgatc

SEQ ID NO: 7431 - RNA, 19 nt, synthetic construct
  source 1..19: mol_type = other RNA
actgaatctaacattcgat

SEQ ID NO: 7432 - RNA, 19 nt, synthetic construct
  source 1..19: mol_type = other RNA
tactgaatctaacattcga

SEQ ID NO: 7433 - RNA, 19 nt, synthetic construct
  source 1..19: mol_type = other RNA
atactgaatctaacattcg

SEQ ID NO: 7434 - RNA, 19 nt, synthetic construct
  source 1..19: mol_type = other RNA
aatactgaatctaacattc

SEQ ID NO: 7435 - RNA, 19 nt, synthetic construct
  source 1..19: mol_type = other RNA
taatactgaatctaacatt

SEQ ID NO: 7436 - RNA, 19 nt, synthetic construct
  source 1..19: mol_type = other RNA
ataatactgaatctaacat

SEQ ID NO: 7437 - RNA, 19 nt, synthetic construct
  source 1..19: mol_type = other RNA
aataatactgaatctaaca

SEQ ID NO: 7438 - RNA, 19 nt, synthetic construct
  source 1..19: mol_type = other RNA
caataatactgaatctaac

SEQ ID NO: 7439 - RNA, 19 nt, synthetic construct
  source 1..19: mol_type = other RNA
tcaataatactgaatctaa

SEQ ID NO: 7440 - RNA, 19 nt, synthetic construct
  source 1..19: mol_type = other RNA
ttcaataatactgaatcta

SEQ ID NO: 7441 - RNA, 19 nt, synthetic construct
  source 1..19: mol_type = other RNA
tttcaataatactgaatct

SEQ ID NO: 7442 - RNA, 19 nt, synthetic construct
  source 1..19: mol_type = other RNA
ctttcaataatactgaatc

SEQ ID NO: 7443 - RNA, 19 nt, synthetic construct
  source 1..19: mol_type = other RNA
tctttcaataatactgaat

SEQ ID NO: 7444 - RNA, 19 nt, synthetic construct
  source 1..19: mol_type = other RNA
ttctttcaataatactgaa

SEQ ID NO: 7445 - RNA, 19 nt, synthetic construct
  source 1..19: mol_type = other RNA
cttctttcaataatactga

SEQ ID NO: 7446 - RNA, 19 nt, synthetic construct
  source 1..19: mol_type = other RNA
tcttctttcaataatactg

SEQ ID NO: 7447 - RNA, 19 nt, synthetic construct
  source 1..19: mol_type = other RNA
ttcttctttcaataatact

SEQ ID NO: 7448 - RNA, 19 nt, synthetic construct
  source 1..19: mol_type = other RNA
tttcttctttcaataatac

SEQ ID NO: 7449 - RNA, 19 nt, synthetic construct
  source 1..19: mol_type = other RNA
ttttcttctttcaataata

SEQ ID NO: 7450 - RNA, 19 nt, synthetic construct
  source 1..19: mol_type = other RNA
attttcttctttcaataat

SEQ ID NO: 7451 - RNA, 19 nt, synthetic construct
  source 1..19: mol_type = other RNA
cattttcttctttcaataa

SEQ ID NO: 7452 - RNA, 19 nt, synthetic construct
  source 1..19: mol_type = other RNA
tcattttcttctttcaata

SEQ ID NO: 7453 - RNA, 19 nt, synthetic construct
  source 1..19: mol_type = other RNA
ctcattttcttctttcaat

SEQ ID NO: 7454 - RNA, 19 nt, synthetic construct
  source 1..19: mol_type = other RNA
gctcattttcttctttcaa

SEQ ID NO: 7455 - RNA, 19 nt, synthetic construct
  source 1..19: mol_type = other RNA
tgctcattttcttctttca

SEQ ID NO: 7456 - RNA, 19 nt, synthetic construct
  source 1..19: mol_type = other RNA
ttgctcattttcttctttc

SEQ ID NO: 7457 - RNA, 19 nt, synthetic construct
  source 1..19: mol_type = other RNA
gttgctcattttcttcttt

SEQ ID NO: 7458 - RNA, 19 nt, synthetic construct
  source 1..19: mol_type = other RNA
ggttgctcattttcttctt

SEQ ID NO: 7459 - RNA, 19 nt, synthetic construct
  source 1..19: mol_type = other RNA
tggttgctcattttcttct

SEQ ID NO: 7460 - RNA, 19 nt, synthetic construct
  source 1..19: mol_type = other RNA
gtggttgctcattttcttc

SEQ ID NO: 7461 - RNA, 19 nt, synthetic construct
  source 1..19: mol_type = other RNA
agtggttgctcattttctt

SEQ ID NO: 7462 - RNA, 19 nt, synthetic construct
  source 1..19: mol_type = other RNA
cagtggttgctcattttct

SEQ ID NO: 7463 - RNA, 19 nt, synthetic construct
  source 1..19: mol_type = other RNA
tcagtggttgctcattttc

SEQ ID NO: 7464 - RNA, 19 nt, synthetic construct
  source 1..19: mol_type = other RNA
ctcagtggttgctcatttt

SEQ ID NO: 7465 - RNA, 19 nt, synthetic construct
  source 1..19: mol_type = other RNA
tctcagtggttgctcattt

SEQ ID NO: 7466 - RNA, 19 nt, synthetic construct
  source 1..19: mol_type = other RNA
atctcagtggttgctcatt

SEQ ID NO: 7467 - RNA, 19 nt, synthetic construct
  source 1..19: mol_type = other RNA
aatctcagtggttgctcat

SEQ ID NO: 7468 - RNA, 19 nt, synthetic construct
  source 1..19: mol_type = other RNA
taatctcagtggttgctca

SEQ ID NO: 7469 - RNA, 19 nt, synthetic construct
  source 1..19: mol_type = other RNA
gtaatctcagtggttgctc

SEQ ID NO: 7470 - RNA, 19 nt, synthetic construct
  source 1..19: mol_type = other RNA
ggtaatctcagtggttgct

SEQ ID NO: 7471 - RNA, 19 nt, synthetic construct
  source 1..19: mol_type = other RNA
tggtaatctcagtggttgc

SEQ ID NO: 7472 - RNA, 19 nt, synthetic construct
  source 1..19: mol_type = other RNA
ttggtaatctcagtggttg

SEQ ID NO: 7473 - RNA, 19 nt, synthetic construct
  source 1..19: mol_type = other RNA
cttggtaatctcagtggtt

SEQ ID NO: 7474 - RNA, 19 nt, synthetic construct
  source 1..19: mol_type = other RNA
acttggtaatctcagtggt

SEQ ID NO: 7475 - RNA, 19 nt, synthetic construct
  source 1..19: mol_type = other RNA
gacttggtaatctcagtgg

SEQ ID NO: 7476 - RNA, 19 nt, synthetic construct
  source 1..19: mol_type = other RNA
ggacttggtaatctcagtg

SEQ ID NO: 7477 - RNA, 19 nt, synthetic construct
  source 1..19: mol_type = other RNA
aggacttggtaatctcagt

SEQ ID NO: 7478 - RNA, 19 nt, synthetic construct
  source 1..19: mol_type = other RNA
caggacttggtaatctcag

SEQ ID NO: 7479 - RNA, 19 nt, synthetic construct
  source 1..19: mol_type = other RNA
tcaggacttggtaatctca

SEQ ID NO: 7480 - RNA, 19 nt, synthetic construct
  source 1..19: mol_type = other RNA
ttcaggacttggtaatctc

SEQ ID NO: 7481 - RNA, 19 nt, synthetic construct
  source 1..19: mol_type = other RNA
cttcaggacttggtaatct

SEQ ID NO: 7482 - RNA, 19 nt, synthetic construct
  source 1..19: mol_type = other RNA
acttcaggacttggtaatc

SEQ ID NO: 7483 - RNA, 19 nt, synthetic construct
  source 1..19: mol_type = other RNA
tacttcaggacttggtaat

SEQ ID NO: 7484 - RNA, 19 nt, synthetic construct
  source 1..19: mol_type = other RNA
atacttcaggacttggtaa

SEQ ID NO: 7485 - RNA, 19 nt, synthetic construct
  source 1..19: mol_type = other RNA
tatacttcaggacttggta

SEQ ID NO: 7486 - RNA, 19 nt, synthetic construct
  source 1..19: mol_type = other RNA
atatacttcaggacttggt

SEQ ID NO: 7487 - RNA, 19 nt, synthetic construct
  source 1..19: mol_type = other RNA
gatatacttcaggacttgg

SEQ ID NO: 7488 - RNA, 19 nt, synthetic construct
  source 1..19: mol_type = other RNA
cgatatacttcaggacttg

SEQ ID NO: 7489 - RNA, 19 nt, synthetic construct
  source 1..19: mol_type = other RNA
acgatatacttcaggactt

SEQ ID NO: 7490 - RNA, 19 nt, synthetic construct
  source 1..19: mol_type = other RNA
aacgatatacttcaggact

SEQ ID NO: 7491 - RNA, 19 nt, synthetic construct
  source 1..19: mol_type = other RNA
aaacgatatacttcaggac

SEQ ID NO: 7492 - RNA, 19 nt, synthetic construct
  source 1..19: mol_type = other RNA
aaaacgatatacttcagga

SEQ ID NO: 7493 - RNA, 19 nt, synthetic construct
  source 1..19: mol_type = other RNA
caaaacgatatacttcagg

SEQ ID NO: 7494 - RNA, 19 nt, synthetic construct
  source 1..19: mol_type = other RNA
acaaaacgatatacttcag

SEQ ID NO: 7495 - RNA, 19 nt, synthetic construct
  source 1..19: mol_type = other RNA
tacaaaacgatatacttca

SEQ ID NO: 7496 - RNA, 19 nt, synthetic construct
  source 1..19: mol_type = other RNA
ctacaaaacgatatacttc

SEQ ID NO: 7497 - RNA, 19 nt, synthetic construct
  source 1..19: mol_type = other RNA
actacaaaacgatatactt

SEQ ID NO: 7498 - RNA, 19 nt, synthetic construct
  source 1..19: mol_type = other RNA
tactacaaaacgatatact

SEQ ID NO: 7499 - RNA, 19 nt, synthetic construct
  source 1..19: mol_type = other RNA
ttactacaaaacgatatac

SEQ ID NO: 7500 - RNA, 19 nt, synthetic construct
  source 1..19: mol_type = other RNA
tttactacaaaacgatata

SEQ ID NO: 7501 - RNA, 19 nt, synthetic construct
  source 1..19: mol_type = other RNA
ttttactacaaaacgatat

SEQ ID NO: 7502 - RNA, 19 nt, synthetic construct
  source 1..19: mol_type = other RNA
cttttactacaaaacgata

SEQ ID NO: 7503 - RNA, 19 nt, synthetic construct
  source 1..19: mol_type = other RNA
tcttttactacaaaacgat

SEQ ID NO: 7504 - RNA, 19 nt, synthetic construct
  source 1..19: mol_type = other RNA
gtcttttactacaaaacga

SEQ ID NO: 7505 - RNA, 19 nt, synthetic construct
  source 1..19: mol_type = other RNA
agtcttttactacaaaacg

SEQ ID NO: 7506 - RNA, 19 nt, synthetic construct
  source 1..19: mol_type = other RNA
gagtcttttactacaaaac

SEQ ID NO: 7507 - RNA, 19 nt, synthetic construct
  source 1..19: mol_type = other RNA
agagtcttttactacaaaa

SEQ ID NO: 7508 - RNA, 19 nt, synthetic construct
  source 1..19: mol_type = other RNA
cagagtcttttactacaaa

SEQ ID NO: 7509 - RNA, 19 nt, synthetic construct
  source 1..19: mol_type = other RNA
tcagagtcttttactacaa

SEQ ID NO: 7510 - RNA, 19 nt, synthetic construct
  source 1..19: mol_type = other RNA
ctcagagtcttttactaca

SEQ ID NO: 7511 - RNA, 19 nt, synthetic construct
  source 1..19: mol_type = other RNA
cctcagagtcttttactac

SEQ ID NO: 7512 - RNA, 19 nt, synthetic construct
  source 1..19: mol_type = other RNA
tcctcagagtcttttacta

SEQ ID NO: 7513 - RNA, 19 nt, synthetic construct
  source 1..19: mol_type = other RNA
ttcctcagagtcttttact

SEQ ID NO: 7514 - RNA, 19 nt, synthetic construct
  source 1..19: mol_type = other RNA
tttcctcagagtcttttac

SEQ ID NO: 7515 - RNA, 19 nt, synthetic construct
  source 1..19: mol_type = other RNA
ttttcctcagagtctttta

SEQ ID NO: 7516 - RNA, 19 nt, synthetic construct
  source 1..19: mol_type = other RNA
gttttcctcagagtctttt

SEQ ID NO: 7517 - RNA, 19 nt, synthetic construct
  source 1..19: mol_type = other RNA
tgttttcctcagagtcttt

SEQ ID NO: 7518 - RNA, 19 nt, synthetic construct
  source 1..19: mol_type = other RNA
atgttttcctcagagtctt

SEQ ID NO: 7519 - RNA, 19 nt, synthetic construct
  source 1..19: mol_type = other RNA
aatgttttcctcagagtct

SEQ ID NO: 7520 - RNA, 19 nt, synthetic construct
  source 1..19: mol_type = other RNA
caatgttttcctcagagtc

SEQ ID NO: 7521 - RNA, 19 nt, synthetic construct
  source 1..19: mol_type = other RNA
acaatgttttcctcagagt

SEQ ID NO: 7522 - RNA, 19 nt, synthetic construct
  source 1..19: mol_type = other RNA
aacaatgttttcctcagag

SEQ ID NO: 7523 - RNA, 19 nt, synthetic construct
  source 1..19: mol_type = other RNA
aaacaatgttttcctcaga

SEQ ID NO: 7524 - RNA, 19 nt, synthetic construct
  source 1..19: mol_type = other RNA
aaaacaatgttttcctcag

SEQ ID NO: 7525 - RNA, 19 nt, synthetic construct
  source 1..19: mol_type = other RNA
aaaaacaatgttttcctca

SEQ ID NO: 7526 - RNA, 19 nt, synthetic construct
  source 1..19: mol_type = other RNA
caaaaacaatgttttcctc

SEQ ID NO: 7527 - RNA, 19 nt, synthetic construct
  source 1..19: mol_type = other RNA
tcaaaaacaatgttttcct

SEQ ID NO: 7528 - RNA, 19 nt, synthetic construct
  source 1..19: mol_type = other RNA
ttcaaaaacaatgttttcc

SEQ ID NO: 7529 - RNA, 19 nt, synthetic construct
  source 1..19: mol_type = other RNA
cttcaaaaacaatgttttc

SEQ ID NO: 7530 - RNA, 19 nt, synthetic construct
  source 1..19: mol_type = other RNA
tcttcaaaaacaatgtttt

SEQ ID NO: 7531 - RNA, 19 nt, synthetic construct
  source 1..19: mol_type = other RNA
gtcttcaaaaacaatgttt

SEQ ID NO: 7532 - RNA, 19 nt, synthetic construct
  source 1..19: mol_type = other RNA
tgtcttcaaaaacaatgtt

SEQ ID NO: 7533 - RNA, 19 nt, synthetic construct
  source 1..19: mol_type = other RNA
ttgtcttcaaaaacaatgt

SEQ ID NO: 7534 - RNA, 19 nt, synthetic construct
  source 1..19: mol_type = other RNA
gttgtcttcaaaaacaatg

SEQ ID NO: 7535 - RNA, 19 nt, synthetic construct
  source 1..19: mol_type = other RNA
agttgtcttcaaaaacaat

SEQ ID NO: 7536 - RNA, 19 nt, synthetic construct
  source 1..19: mol_type = other RNA
aagttgtcttcaaaaacaa

SEQ ID NO: 7537 - RNA, 19 nt, synthetic construct
  source 1..19: mol_type = other RNA
caagttgtcttcaaaaaca

SEQ ID NO: 7538 - RNA, 19 nt, synthetic construct
  source 1..19: mol_type = other RNA
gcaagttgtcttcaaaaac

SEQ ID NO: 7539 - RNA, 19 nt, synthetic construct
  source 1..19: mol_type = other RNA
tgcaagttgtcttcaaaaa

SEQ ID NO: 7540 - RNA, 19 nt, synthetic construct
  source 1..19: mol_type = other RNA
ttgcaagttgtcttcaaaa

SEQ ID NO: 7541 - RNA, 19 nt, synthetic construct
  source 1..19: mol_type = other RNA
tttgcaagttgtcttcaaa

SEQ ID NO: 7542 - RNA, 19 nt, synthetic construct
  source 1..19: mol_type = other RNA
ctttgcaagttgtcttcaa

SEQ ID NO: 7543 - RNA, 19 nt, synthetic construct
  source 1..19: mol_type = other RNA
actttgcaagttgtcttca

SEQ ID NO: 7544 - RNA, 19 nt, synthetic construct
  source 1..19: mol_type = other RNA
tactttgcaagttgtcttc

SEQ ID NO: 7545 - RNA, 19 nt, synthetic construct
  source 1..19: mol_type = other RNA
ctactttgcaagttgtctt

SEQ ID NO: 7546 - RNA, 19 nt, synthetic construct
  source 1..19: mol_type = other RNA
tctactttgcaagttgtct

SEQ ID NO: 7547 - RNA, 19 nt, synthetic construct
  source 1..19: mol_type = other RNA
ttctactttgcaagttgtc

SEQ ID NO: 7548 - RNA, 19 nt, synthetic construct
  source 1..19: mol_type = other RNA
cttctactttgcaagttgt

SEQ ID NO: 7549 - RNA, 19 nt, synthetic construct
  source 1..19: mol_type = other RNA
acttctactttgcaagttg

SEQ ID NO: 7550 - RNA, 19 nt, synthetic construct
  source 1..19: mol_type = other RNA
cacttctactttgcaagtt

SEQ ID NO: 7551 - RNA, 19 nt, synthetic construct
  source 1..19: mol_type = other RNA
ccacttctactttgcaagt

SEQ ID NO: 7552 - RNA, 19 nt, synthetic construct
  source 1..19: mol_type = other RNA
gccacttctactttgcaag

SEQ ID NO: 7553 - RNA, 19 nt, synthetic construct
  source 1..19: mol_type = other RNA
tgccacttctactttgcaa

SEQ ID NO: 7554 - RNA, 19 nt, synthetic construct
  source 1..19: mol_type = other RNA
atgccacttctactttgca

SEQ ID NO: 7555 - RNA, 19 nt, synthetic construct
  source 1..19: mol_type = other RNA
gatgccacttctactttgc

SEQ ID NO: 7556 - RNA, 19 nt, synthetic construct
  source 1..19: mol_type = other RNA
ggatgccacttctactttg

SEQ ID NO: 7557 - RNA, 19 nt, synthetic construct
  source 1..19: mol_type = other RNA
gggatgccacttctacttt

SEQ ID NO: 7558 - RNA, 19 nt, synthetic construct
  source 1..19: mol_type = other RNA
ggggatgccacttctactt

SEQ ID NO: 7559 - RNA, 19 nt, synthetic construct
  source 1..19: mol_type = other RNA
tggggatgccacttctact

SEQ ID NO: 7560 - RNA, 19 nt, synthetic construct
  source 1..19: mol_type = other RNA
atggggatgccacttctac

SEQ ID NO: 7561 - RNA, 19 nt, synthetic construct
  source 1..19: mol_type = other RNA
aatggggatgccacttcta

SEQ ID NO: 7562 - RNA, 19 nt, synthetic construct
  source 1..19: mol_type = other RNA
taatggggatgccacttct

SEQ ID NO: 7563 - RNA, 19 nt, synthetic construct
  source 1..19: mol_type = other RNA
ataatggggatgccacttc

SEQ ID NO: 7564 - RNA, 19 nt, synthetic construct
  source 1..19: mol_type = other RNA
aataatggggatgccactt

SEQ ID NO: 7565 - RNA, 19 nt, synthetic construct
  source 1..19: mol_type = other RNA
taataatggggatgccact

SEQ ID NO: 7566 - RNA, 19 nt, synthetic construct
  source 1..19: mol_type = other RNA
ttaataatggggatgccac

SEQ ID NO: 7567 - RNA, 19 nt, synthetic construct
  source 1..19: mol_type = other RNA
tttaataatggggatgcca

SEQ ID NO: 7568 - RNA, 19 nt, synthetic construct
  source 1..19: mol_type = other RNA
ctttaataatggggatgcc

SEQ ID NO: 7569 - RNA, 19 nt, synthetic construct
  source 1..19: mol_type = other RNA
cctttaataatggggatgc

SEQ ID NO: 7570 - RNA, 19 nt, synthetic construct
  source 1..19: mol_type = other RNA
tcctttaataatggggatg

SEQ ID NO: 7571 - RNA, 19 nt, synthetic construct
  source 1..19: mol_type = other RNA
ctcctttaataatggggat

SEQ ID NO: 7572 - RNA, 19 nt, synthetic construct
  source 1..19: mol_type = other RNA
cctcctttaataatgggga

SEQ ID NO: 7573 - RNA, 19 nt, synthetic construct
  source 1..19: mol_type = other RNA
tcctcctttaataatgggg

SEQ ID NO: 7574 - RNA, 19 nt, synthetic construct
  source 1..19: mol_type = other RNA
ttcctcctttaataatggg

SEQ ID NO: 7575 - RNA, 19 nt, synthetic construct
  source 1..19: mol_type = other RNA
gttcctcctttaataatgg

SEQ ID NO: 7576 - RNA, 19 nt, synthetic construct
  source 1..19: mol_type = other RNA
agttcctcctttaataatg

SEQ ID NO: 7577 - RNA, 19 nt, synthetic construct
  source 1..19: mol_type = other RNA
cagttcctcctttaataat

SEQ ID NO: 7578 - RNA, 19 nt, synthetic construct
  source 1..19: mol_type = other RNA
acagttcctcctttaataa

SEQ ID NO: 7579 - RNA, 19 nt, synthetic construct
  source 1..19: mol_type = other RNA
tacagttcctcctttaata

SEQ ID NO: 7580 - RNA, 19 nt, synthetic construct
  source 1..19: mol_type = other RNA
ctacagttcctcctttaat

SEQ ID NO: 7581 - RNA, 19 nt, synthetic construct
  source 1..19: mol_type = other RNA
actacagttcctcctttaa

SEQ ID NO: 7582 - RNA, 19 nt, synthetic construct
  source 1..19: mol_type = other RNA
cactacagttcctccttta

SEQ ID NO: 7583 - RNA, 19 nt, synthetic construct
  source 1..19: mol_type = other RNA
tcactacagttcctccttt

SEQ ID NO: 7584 - RNA, 19 nt, synthetic construct
  source 1..19: mol_type = other RNA
ttcactacagttcctcctt

SEQ ID NO: 7585 - RNA, 19 nt, synthetic construct
  source 1..19: mol_type = other RNA
tttcactacagttcctcct

SEQ ID NO: 7586 - RNA, 19 nt, synthetic construct
  source 1..19: mol_type = other RNA
atttcactacagttcctcc

SEQ ID NO: 7587 - RNA, 19 nt, synthetic construct
  source 1..19: mol_type = other RNA
aatttcactacagttcctc

SEQ ID NO: 7588 - RNA, 19 nt, synthetic construct
  source 1..19: mol_type = other RNA
taatttcactacagttcct

SEQ ID NO: 7589 - RNA, 19 nt, synthetic construct
  source 1..19: mol_type = other RNA
ttaatttcactacagttcc

SEQ ID NO: 7590 - RNA, 19 nt, synthetic construct
  source 1..19: mol_type = other RNA
attaatttcactacagttc

SEQ ID NO: 7591 - RNA, 19 nt, synthetic construct
  source 1..19: mol_type = other RNA
aattaatttcactacagtt

SEQ ID NO: 7592 - RNA, 19 nt, synthetic construct
  source 1..19: mol_type = other RNA
caattaatttcactacagt

SEQ ID NO: 7593 - RNA, 19 nt, synthetic construct
  source 1..19: mol_type = other RNA
tcaattaatttcactacag

SEQ ID NO: 7594 - RNA, 19 nt, synthetic construct
  source 1..19: mol_type = other RNA
ttcaattaatttcactaca

SEQ ID NO: 7595 - RNA, 19 nt, synthetic construct
  source 1..19: mol_type = other RNA
tttcaattaatttcactac

SEQ ID NO: 7596 - RNA, 19 nt, synthetic construct
  source 1..19: mol_type = other RNA
ctttcaattaatttcacta

SEQ ID NO: 7597 - RNA, 19 nt, synthetic construct
  source 1..19: mol_type = other RNA
cctttcaattaatttcact

SEQ ID NO: 7598 - RNA, 19 nt, synthetic construct
  source 1..19: mol_type = other RNA
acctttcaattaatttcac

SEQ ID NO: 7599 - RNA, 19 nt, synthetic construct
  source 1..19: mol_type = other RNA
aacctttcaattaatttca

SEQ ID NO: 7600 - RNA, 19 nt, synthetic construct
  source 1..19: mol_type = other RNA
taacctttcaattaatttc

SEQ ID NO: 7601 - RNA, 19 nt, synthetic construct
  source 1..19: mol_type = other RNA
ttaacctttcaattaattt

SEQ ID NO: 7602 - RNA, 19 nt, synthetic construct
  source 1..19: mol_type = other RNA
gttaacctttcaattaatt

SEQ ID NO: 7603 - RNA, 19 nt, synthetic construct
  source 1..19: mol_type = other RNA
tgttaacctttcaattaat

SEQ ID NO: 7604 - RNA, 19 nt, synthetic construct
  source 1..19: mol_type = other RNA
atgttaacctttcaattaa

SEQ ID NO: 7605 - RNA, 19 nt, synthetic construct
  source 1..19: mol_type = other RNA
tatgttaacctttcaatta

SEQ ID NO: 7606 - RNA, 19 nt, synthetic construct
  source 1..19: mol_type = other RNA
atatgttaacctttcaatt

SEQ ID NO: 7607 - RNA, 19 nt, synthetic construct
  source 1..19: mol_type = other RNA
gatatgttaacctttcaat

SEQ ID NO: 7608 - RNA, 19 nt, synthetic construct
  source 1..19: mol_type = other RNA
tgatatgttaacctttcaa

SEQ ID NO: 7609 - RNA, 19 nt, synthetic construct
  source 1..19: mol_type = other RNA
atgatatgttaacctttca

SEQ ID NO: 7610 - RNA, 19 nt, synthetic construct
  source 1..19: mol_type = other RNA
tatgatatgttaacctttc

SEQ ID NO: 7611 - RNA, 19 nt, synthetic construct
  source 1..19: mol_type = other RNA
atatgatatgttaaccttt

SEQ ID NO: 7612 - RNA, 19 nt, synthetic construct
  source 1..19: mol_type = other RNA
catatgatatgttaacctt

SEQ ID NO: 7613 - RNA, 19 nt, synthetic construct
  source 1..19: mol_type = other RNA
acatatgatatgttaacct

SEQ ID NO: 7614 - RNA, 19 nt, synthetic construct
  source 1..19: mol_type = other RNA
tacatatgatatgttaacc

SEQ ID NO: 7615 - RNA, 19 nt, synthetic construct
  source 1..19: mol_type = other RNA
atacatatgatatgttaac

SEQ ID NO: 7616 - RNA, 19 nt, synthetic construct
  source 1..19: mol_type = other RNA
catacatatgatatgttaa

SEQ ID NO: 7617 - RNA, 19 nt, synthetic construct
  source 1..19: mol_type = other RNA
gcatacatatgatatgtta

SEQ ID NO: 7618 - RNA, 19 nt, synthetic construct
  source 1..19: mol_type = other RNA
tgcatacatatgatatgtt

SEQ ID NO: 7619 - RNA, 19 nt, synthetic construct
  source 1..19: mol_type = other RNA
ctgcatacatatgatatgt

SEQ ID NO: 7620 - RNA, 19 nt, synthetic construct
  source 1..19: mol_type = other RNA
tctgcatacatatgatatg

SEQ ID NO: 7621 - RNA, 19 nt, synthetic construct
  source 1..19: mol_type = other RNA
atctgcatacatatgatat

SEQ ID NO: 7622 - RNA, 19 nt, synthetic construct
  source 1..19: mol_type = other RNA
gatctgcatacatatgata

SEQ ID NO: 7623 - RNA, 19 nt, synthetic construct
  source 1..19: mol_type = other RNA
ggatctgcatacatatgat

SEQ ID NO: 7624 - RNA, 19 nt, synthetic construct
  source 1..19: mol_type = other RNA
gggatctgcatacatatga

SEQ ID NO: 7625 - RNA, 19 nt, synthetic construct
  source 1..19: mol_type = other RNA
tgggatctgcatacatatg

SEQ ID NO: 7626 - RNA, 19 nt, synthetic construct
  source 1..19: mol_type = other RNA
ttgggatctgcatacatat

SEQ ID NO: 7627 - RNA, 19 nt, synthetic construct
  source 1..19: mol_type = other RNA
attgggatctgcatacata

SEQ ID NO: 7628 - RNA, 19 nt, synthetic construct
  source 1..19: mol_type = other RNA
aattgggatctgcatacat

SEQ ID NO: 7629 - RNA, 19 nt, synthetic construct
  source 1..19: mol_type = other RNA
aaattgggatctgcataca

SEQ ID NO: 7630 - RNA, 19 nt, synthetic construct
  source 1..19: mol_type = other RNA
aaaattgggatctgcatac

SEQ ID NO: 7631 - RNA, 19 nt, synthetic construct
  source 1..19: mol_type = other RNA
caaaattgggatctgcata

SEQ ID NO: 7632 - RNA, 19 nt, synthetic construct
  source 1..19: mol_type = other RNA
acaaaattgggatctgcat

SEQ ID NO: 7633 - RNA, 19 nt, synthetic construct
  source 1..19: mol_type = other RNA
aacaaaattgggatctgca

SEQ ID NO: 7634 - RNA, 19 nt, synthetic construct
  source 1..19: mol_type = other RNA
gaacaaaattgggatctgc

SEQ ID NO: 7635 - RNA, 19 nt, synthetic construct
  source 1..19: mol_type = other RNA
cgaacaaaattgggatctg

SEQ ID NO: 7636 - RNA, 19 nt, synthetic construct
  source 1..19: mol_type = other RNA
acgaacaaaattgggatct

SEQ ID NO: 7637 - RNA, 19 nt, synthetic construct
  source 1..19: mol_type = other RNA
tacgaacaaaattgggatc

SEQ ID NO: 7638 - RNA, 19 nt, synthetic construct
  source 1..19: mol_type = other RNA
gtacgaacaaaattgggat

SEQ ID NO: 7639 - RNA, 19 nt, synthetic construct
  source 1..19: mol_type = other RNA
agtacgaacaaaattggga

SEQ ID NO: 7640 - RNA, 19 nt, synthetic construct
  source 1..19: mol_type = other RNA
aagtacgaacaaaattggg

SEQ ID NO: 7641 - RNA, 19 nt, synthetic construct
  source 1..19: mol_type = other RNA
aaagtacgaacaaaattgg

SEQ ID NO: 7642 - RNA, 19 nt, synthetic construct
  source 1..19: mol_type = other RNA
aaaagtacgaacaaaattg

SEQ ID NO: 7643 - RNA, 19 nt, synthetic construct
  source 1..19: mol_type = other RNA
gaaaagtacgaacaaaatt

SEQ ID NO: 7644 - RNA, 19 nt, synthetic construct
  source 1..19: mol_type = other RNA
agaaaagtacgaacaaaat

SEQ ID NO: 7645 - RNA, 19 nt, synthetic construct
  source 1..19: mol_type = other RNA
aagaaaagtacgaacaaaa

SEQ ID NO: 7646 - RNA, 19 nt, synthetic construct
  source 1..19: mol_type = other RNA
taagaaaagtacgaacaaa

SEQ ID NO: 7647 - RNA, 19 nt, synthetic construct
  source 1..19: mol_type = other RNA
gtaagaaaagtacgaacaa

SEQ ID NO: 7648 - RNA, 19 nt, synthetic construct
  source 1..19: mol_type = other RNA
ggtaagaaaagtacgaaca

SEQ ID NO: 7649 - RNA, 19 nt, synthetic construct
  source 1..19: mol_type = other RNA
tggtaagaaaagtacgaac

SEQ ID NO: 7650 - RNA, 19 nt, synthetic construct
  source 1..19: mol_type = other RNA
gtggtaagaaaagtacgaa

SEQ ID NO: 7651 - RNA, 19 nt, synthetic construct
  source 1..19: mol_type = other RNA
tgtggtaagaaaagtacga

SEQ ID NO: 7652 - RNA, 19 nt, synthetic construct
  source 1..19: mol_type = other RNA
atgtggtaagaaaagtacg

SEQ ID NO: 7653 - RNA, 19 nt, synthetic construct
  source 1..19: mol_type = other RNA
tatgtggtaagaaaagtac

SEQ ID NO: 7654 - RNA, 19 nt, synthetic construct
  source 1..19: mol_type = other RNA
atatgtggtaagaaaagta

SEQ ID NO: 7655 - RNA, 19 nt, synthetic construct
  source 1..19: mol_type = other RNA
gatatgtggtaagaaaagt

SEQ ID NO: 7656 - RNA, 19 nt, synthetic construct
  source 1..19: mol_type = other RNA
cgatatgtggtaagaaaag

SEQ ID NO: 7657 - RNA, 19 nt, synthetic construct
  source 1..19: mol_type = other RNA
acgatatgtggtaagaaaa

SEQ ID NO: 7658 - RNA, 19 nt, synthetic construct
  source 1..19: mol_type = other RNA
aacgatatgtggtaagaaa

SEQ ID NO: 7659 - RNA, 19 nt, synthetic construct
  source 1..19: mol_type = other RNA
gaacgatatgtggtaagaa

SEQ ID NO: 7660 - RNA, 19 nt, synthetic construct
  source 1..19: mol_type = other RNA
tgaacgatatgtggtaaga

SEQ ID NO: 7661 - RNA, 19 nt, synthetic construct
  source 1..19: mol_type = other RNA
atgaacgatatgtggtaag

SEQ ID NO: 7662 - RNA, 19 nt, synthetic construct
  source 1..19: mol_type = other RNA
aatgaacgatatgtggtaa

SEQ ID NO: 7663 - RNA, 19 nt, synthetic construct
  source 1..19: mol_type = other RNA
aaatgaacgatatgtggta

SEQ ID NO: 7664 - RNA, 19 nt, synthetic construct
  source 1..19: mol_type = other RNA
aaaatgaacgatatgtggt

SEQ ID NO: 7665 - RNA, 19 nt, synthetic construct
  source 1..19: mol_type = other RNA
caaaatgaacgatatgtgg

SEQ ID NO: 7666 - RNA, 19 nt, synthetic construct
  source 1..19: mol_type = other RNA
acaaaatgaacgatatgtg

SEQ ID NO: 7667 - RNA, 19 nt, synthetic construct
  source 1..19: mol_type = other RNA
tacaaaatgaacgatatgt

SEQ ID NO: 7668 - RNA, 19 nt, synthetic construct
  source 1..19: mol_type = other RNA
ttacaaaatgaacgatatg

SEQ ID NO: 7669 - RNA, 19 nt, synthetic construct
  source 1..19: mol_type = other RNA
tttacaaaatgaacgatat

SEQ ID NO: 7670 - RNA, 19 nt, synthetic construct
  source 1..19: mol_type = other RNA
gtttacaaaatgaacgata

SEQ ID NO: 7671 - RNA, 19 nt, synthetic construct
  source 1..19: mol_type = other RNA
ggtttacaaaatgaacgat

SEQ ID NO: 7672 - RNA, 19 nt, synthetic construct
  source 1..19: mol_type = other RNA
tggtttacaaaatgaacga

SEQ ID NO: 7673 - RNA, 19 nt, synthetic construct
  source 1..19: mol_type = other RNA
gtggtttacaaaatgaacg

SEQ ID NO: 7674 - RNA, 19 nt, synthetic construct
  source 1..19: mol_type = other RNA
tgtggtttacaaaatgaac

SEQ ID NO: 7675 - RNA, 19 nt, synthetic construct
  source 1..19: mol_type = other RNA
ctgtggtttacaaaatgaa

SEQ ID NO: 7676 - RNA, 19 nt, synthetic construct
  source 1..19: mol_type = other RNA
cctgtggtttacaaaatga

SEQ ID NO: 7677 - RNA, 19 nt, synthetic construct
  source 1..19: mol_type = other RNA
tcctgtggtttacaaaatg

SEQ ID NO: 7678 - RNA, 19 nt, synthetic construct
  source 1..19: mol_type = other RNA
ttcctgtggtttacaaaat

SEQ ID NO: 7679 - RNA, 19 nt, synthetic construct
  source 1..19: mol_type = other RNA
attcctgtggtttacaaaa

SEQ ID NO: 7680 - RNA, 19 nt, synthetic construct
  source 1..19: mol_type = other RNA
aattcctgtggtttacaaa

SEQ ID NO: 7681 - RNA, 19 nt, synthetic construct
  source 1..19: mol_type = other RNA
caattcctgtggtttacaa

SEQ ID NO: 7682 - RNA, 19 nt, synthetic construct
  source 1..19: mol_type = other RNA
gcaattcctgtggtttaca

SEQ ID NO: 7683 - RNA, 19 nt, synthetic construct
  source 1..19: mol_type = other RNA
agcaattcctgtggtttac

SEQ ID NO: 7684 - RNA, 19 nt, synthetic construct
  source 1..19: mol_type = other RNA
cagcaattcctgtggttta

SEQ ID NO: 7685 - RNA, 19 nt, synthetic construct
  source 1..19: mol_type = other RNA
tcagcaattcctgtggttt

SEQ ID NO: 7686 - RNA, 19 nt, synthetic construct
  source 1..19: mol_type = other RNA
ctcagcaattcctgtggtt

SEQ ID NO: 7687 - RNA, 19 nt, synthetic construct
  source 1..19: mol_type = other RNA
gctcagcaattcctgtggt

SEQ ID NO: 7688 - RNA, 19 nt, synthetic construct
  source 1..19: mol_type = other RNA
agctcagcaattcctgtgg

SEQ ID NO: 7689 - RNA, 19 nt, synthetic construct
  source 1..19: mol_type = other RNA
aagctcagcaattcctgtg

SEQ ID NO: 7690 - RNA, 19 nt, synthetic construct
  source 1..19: mol_type = other RNA
taagctcagcaattcctgt

SEQ ID NO: 7691 - RNA, 19 nt, synthetic construct
  source 1..19: mol_type = other RNA
gtaagctcagcaattcctg

SEQ ID NO: 7692 - RNA, 19 nt, synthetic construct
  source 1..19: mol_type = other RNA
agtaagctcagcaattcct

SEQ ID NO: 7693 - RNA, 19 nt, synthetic construct
  source 1..19: mol_type = other RNA
cagtaagctcagcaattcc

SEQ ID NO: 7694 - RNA, 19 nt, synthetic construct
  source 1..19: mol_type = other RNA
tcagtaagctcagcaattc

SEQ ID NO: 7695 - RNA, 19 nt, synthetic construct
  source 1..19: mol_type = other RNA
atcagtaagctcagcaatt

SEQ ID NO: 7696 - RNA, 19 nt, synthetic construct
  source 1..19: mol_type = other RNA
aatcagtaagctcagcaat

SEQ ID NO: 7697 - RNA, 19 nt, synthetic construct
  source 1..19: mol_type = other RNA
caatcagtaagctcagcaa

SEQ ID NO: 7698 - RNA, 19 nt, synthetic construct
  source 1..19: mol_type = other RNA
tcaatcagtaagctcagca

SEQ ID NO: 7699 - RNA, 19 nt, synthetic construct
  source 1..19: mol_type = other RNA
ttcaatcagtaagctcagc

SEQ ID NO: 7700 - RNA, 19 nt, synthetic construct
  source 1..19: mol_type = other RNA
gttcaatcagtaagctcag

SEQ ID NO: 7701 - RNA, 19 nt, synthetic construct
  source 1..19: mol_type = other RNA
cgttcaatcagtaagctca

SEQ ID NO: 7702 - RNA, 19 nt, synthetic construct
  source 1..19: mol_type = other RNA
ccgttcaatcagtaagctc

SEQ ID NO: 7703 - RNA, 19 nt, synthetic construct
  source 1..19: mol_type = other RNA
accgttcaatcagtaagct

SEQ ID NO: 7704 - RNA, 19 nt, synthetic construct
  source 1..19: mol_type = other RNA
aaccgttcaatcagtaagc

SEQ ID NO: 7705 - RNA, 19 nt, synthetic construct
  source 1..19: mol_type = other RNA
aaaccgttcaatcagtaag

SEQ ID NO: 7706 - RNA, 19 nt, synthetic construct
  source 1..19: mol_type = other RNA
caaaccgttcaatcagtaa

SEQ ID NO: 7707 - RNA, 19 nt, synthetic construct
  source 1..19: mol_type = other RNA
tcaaaccgttcaatcagta

SEQ ID NO: 7708 - RNA, 19 nt, synthetic construct
  source 1..19: mol_type = other RNA
ttcaaaccgttcaatcagt

SEQ ID NO: 7709 - RNA, 19 nt, synthetic construct
  source 1..19: mol_type = other RNA
tttcaaaccgttcaatcag

SEQ ID NO: 7710 - RNA, 19 nt, synthetic construct
  source 1..19: mol_type = other RNA
atttcaaaccgttcaatca

SEQ ID NO: 7711 - RNA, 19 nt, synthetic construct
  source 1..19: mol_type = other RNA
aatttcaaaccgttcaatc

SEQ ID NO: 7712 - RNA, 19 nt, synthetic construct
  source 1..19: mol_type = other RNA
gaatttcaaaccgttcaat

SEQ ID NO: 7713 - RNA, 19 nt, synthetic construct
  source 1..19: mol_type = other RNA
ggaatttcaaaccgttcaa

SEQ ID NO: 7714 - RNA, 19 nt, synthetic construct
  source 1..19: mol_type = other RNA
tggaatttcaaaccgttca

SEQ ID NO: 7715 - RNA, 19 nt, synthetic construct
  source 1..19: mol_type = other RNA
ctggaatttcaaaccgttc

SEQ ID NO: 7716 - RNA, 19 nt, synthetic construct
  source 1..19: mol_type = other RNA
tctggaatttcaaaccgtt

SEQ ID NO: 7717 - RNA, 19 nt, synthetic construct
  source 1..19: mol_type = other RNA
ctctggaatttcaaaccgt

SEQ ID NO: 7718 - RNA, 19 nt, synthetic construct
  source 1..19: mol_type = other RNA
gctctggaatttcaaaccg

SEQ ID NO: 7719 - RNA, 19 nt, synthetic construct
  source 1..19: mol_type = other RNA
ggctctggaatttcaaacc

SEQ ID NO: 7720 - RNA, 19 nt, synthetic construct
  source 1..19: mol_type = other RNA
tggctctggaatttcaaac

SEQ ID NO: 7721 - RNA, 19 nt, synthetic construct
  source 1..19: mol_type = other RNA
ctggctctggaatttcaaa

SEQ ID NO: 7722 - RNA, 19 nt, synthetic construct
  source 1..19: mol_type = other RNA
tctggctctggaatttcaa

SEQ ID NO: 7723 - RNA, 19 nt, synthetic construct
  source 1..19: mol_type = other RNA
ttctggctctggaatttca

SEQ ID NO: 7724 - RNA, 19 nt, synthetic construct
  source 1..19: mol_type = other RNA
gttctggctctggaatttc

SEQ ID NO: 7725 - RNA, 19 nt, synthetic construct
  source 1..19: mol_type = other RNA
ggttctggctctggaattt

SEQ ID NO: 7726 - RNA, 19 nt, synthetic construct
  source 1..19: mol_type = other RNA
aggttctggctctggaatt

SEQ ID NO: 7727 - RNA, 19 nt, synthetic construct
  source 1..19: mol_type = other RNA
taggttctggctctggaat

SEQ ID NO: 7728 - RNA, 19 nt, synthetic construct
  source 1..19: mol_type = other RNA
gtaggttctggctctggaa

SEQ ID NO: 7729 - RNA, 19 nt, synthetic construct
  source 1..19: mol_type = other RNA
agtaggttctggctctgga

SEQ ID NO: 7730 - RNA, 19 nt, synthetic construct
  source 1..19: mol_type = other RNA
cagtaggttctggctctgg

SEQ ID NO: 7731 - RNA, 19 nt, synthetic construct
  source 1..19: mol_type = other RNA
tcagtaggttctggctctg

SEQ ID NO: 7732 - RNA, 19 nt, synthetic construct
  source 1..19: mol_type = other RNA
gtcagtaggttctggctct

SEQ ID NO: 7733 - RNA, 19 nt, synthetic construct
  source 1..19: mol_type = other RNA
cgtcagtaggttctggctc

SEQ ID NO: 7734 - RNA, 19 nt, synthetic construct
  source 1..19: mol_type = other RNA
gcgtcagtaggttctggct

SEQ ID NO: 7735 - RNA, 19 nt, synthetic construct
  source 1..19: mol_type = other RNA
tgcgtcagtaggttctggc

SEQ ID NO: 7736 - RNA, 19 nt, synthetic construct
  source 1..19: mol_type = other RNA
ctgcgtcagtaggttctgg

SEQ ID NO: 7737 - RNA, 19 nt, synthetic construct
  source 1..19: mol_type = other RNA
tctgcgtcagtaggttctg

SEQ ID NO: 7738 - RNA, 19 nt, synthetic construct
  source 1..19: mol_type = other RNA
gtctgcgtcagtaggttct

SEQ ID NO: 7739 - RNA, 19 nt, synthetic construct
  source 1..19: mol_type = other RNA
tgtctgcgtcagtaggttc

SEQ ID NO: 7740 - RNA, 19 nt, synthetic construct
  source 1..19: mol_type = other RNA
ttgtctgcgtcagtaggtt

SEQ ID NO: 7741 - RNA, 19 nt, synthetic construct
  source 1..19: mol_type = other RNA
tttgtctgcgtcagtaggt

SEQ ID NO: 7742 - RNA, 19 nt, synthetic construct
  source 1..19: mol_type = other RNA
atttgtctgcgtcagtagg

SEQ ID NO: 7743 - RNA, 19 nt, synthetic construct
  source 1..19: mol_type = other RNA
aatttgtctgcgtcagtag

SEQ ID NO: 7744 - RNA, 19 nt, synthetic construct
  source 1..19: mol_type = other RNA
caatttgtctgcgtcagta

SEQ ID NO: 7745 - RNA, 19 nt, synthetic construct
  source 1..19: mol_type = other RNA
ccaatttgtctgcgtcagt

SEQ ID NO: 7746 - RNA, 19 nt, synthetic construct
  source 1..19: mol_type = other RNA
gccaatttgtctgcgtcag

SEQ ID NO: 7747 - RNA, 19 nt, synthetic construct
  source 1..19: mol_type = other RNA
tgccaatttgtctgcgtca

SEQ ID NO: 7748 - RNA, 19 nt, synthetic construct
  source 1..19: mol_type = other RNA
ttgccaatttgtctgcgtc

SEQ ID NO: 7749 - RNA, 19 nt, synthetic construct
  source 1..19: mol_type = other RNA
attgccaatttgtctgcgt

SEQ ID NO: 7750 - RNA, 19 nt, synthetic construct
  source 1..19: mol_type = other RNA
tattgccaatttgtctgcg

SEQ ID NO: 7751 - RNA, 19 nt, synthetic construct
  source 1..19: mol_type = other RNA
ctattgccaatttgtctgc

SEQ ID NO: 7752 - RNA, 19 nt, synthetic construct
  source 1..19: mol_type = other RNA
tctattgccaatttgtctg

SEQ ID NO: 7753 - RNA, 19 nt, synthetic construct
  source 1..19: mol_type = other RNA
ctctattgccaatttgtct

SEQ ID NO: 7754 - RNA, 19 nt, synthetic construct
  source 1..19: mol_type = other RNA
tctctattgccaatttgtc

SEQ ID NO: 7755 - RNA, 19 nt, synthetic construct
  source 1..19: mol_type = other RNA
ttctctattgccaatttgt

SEQ ID NO: 7756 - RNA, 19 nt, synthetic construct
  source 1..19: mol_type = other RNA
tttctctattgccaatttg

SEQ ID NO: 7757 - RNA, 19 nt, synthetic construct
  source 1..19: mol_type = other RNA
ctttctctattgccaattt

SEQ ID NO: 7758 - RNA, 19 nt, synthetic construct
  source 1..19: mol_type = other RNA
cctttctctattgccaatt

SEQ ID NO: 7759 - RNA, 19 nt, synthetic construct
  source 1..19: mol_type = other RNA
gcctttctctattgccaat

SEQ ID NO: 7760 - RNA, 19 nt, synthetic construct
  source 1..19: mol_type = other RNA
cgcctttctctattgccaa

SEQ ID NO: 7761 - RNA, 19 nt, synthetic construct
  source 1..19: mol_type = other RNA
tcgcctttctctattgcca

SEQ ID NO: 7762 - RNA, 19 nt, synthetic construct
  source 1..19: mol_type = other RNA
ctcgcctttctctattgcc

SEQ ID NO: 7763 - RNA, 19 nt, synthetic construct
  source 1..19: mol_type = other RNA
gctcgcctttctctattgc

SEQ ID NO: 7764 - RNA, 19 nt, synthetic construct
  source 1..19: mol_type = other RNA
tgctcgcctttctctattg

SEQ ID NO: 7765 - RNA, 19 nt, synthetic construct
  source 1..19: mol_type = other RNA
ctgctcgcctttctctatt

SEQ ID NO: 7766 - RNA, 19 nt, synthetic construct
  source 1..19: mol_type = other RNA
gctgctcgcctttctctat

SEQ ID NO: 7767 - RNA, 19 nt, synthetic construct
  source 1..19: mol_type = other RNA
ggctgctcgcctttctcta

SEQ ID NO: 7768 - RNA, 19 nt, synthetic construct
  source 1..19: mol_type = other RNA
tggctgctcgcctttctct

SEQ ID NO: 7769 - RNA, 19 nt, synthetic construct
  source 1..19: mol_type = other RNA
ttggctgctcgcctttctc

SEQ ID NO: 7770 - RNA, 19 nt, synthetic construct
  source 1..19: mol_type = other RNA
attggctgctcgcctttct

SEQ ID NO: 7771 - RNA, 19 nt, synthetic construct
  source 1..19: mol_type = other RNA
gattggctgctcgcctttc

SEQ ID NO: 7772 - RNA, 19 nt, synthetic construct
  source 1..19: mol_type = other RNA
tgattggctgctcgccttt

SEQ ID NO: 7773 - RNA, 19 nt, synthetic construct
  source 1..19: mol_type = other RNA
ctgattggctgctcgcctt

SEQ ID NO: 7774 - RNA, 19 nt, synthetic construct
  source 1..19: mol_type = other RNA
actgattggctgctcgcct

SEQ ID NO: 7775 - RNA, 19 nt, synthetic construct
  source 1..19: mol_type = other RNA
cactgattggctgctcgcc

SEQ ID NO: 7776 - RNA, 19 nt, synthetic construct
  source 1..19: mol_type = other RNA
gcactgattggctgctcgc

SEQ ID NO: 7777 - RNA, 19 nt, synthetic construct
  source 1..19: mol_type = other RNA
tgcactgattggctgctcg

SEQ ID NO: 7778 - RNA, 19 nt, synthetic construct
  source 1..19: mol_type = other RNA
ctgcactgattggctgctc

SEQ ID NO: 7779 - RNA, 19 nt, synthetic construct
  source 1..19: mol_type = other RNA
tctgcactgattggctgct

SEQ ID NO: 7780 - RNA, 19 nt, synthetic construct
  source 1..19: mol_type = other RNA
gtctgcactgattggctgc

SEQ ID NO: 7781 - RNA, 19 nt, synthetic construct
  source 1..19: mol_type = other RNA
ggtctgcactgattggctg

SEQ ID NO: 7782 - RNA, 19 nt, synthetic construct
  source 1..19: mol_type = other RNA
aggtctgcactgattggct

SEQ ID NO: 7783 - RNA, 19 nt, synthetic construct
  source 1..19: mol_type = other RNA
aaggtctgcactgattggc

SEQ ID NO: 7784 - RNA, 19 nt, synthetic construct
  source 1..19: mol_type = other RNA
taaggtctgcactgattgg

SEQ ID NO: 7785 - RNA, 19 nt, synthetic construct
  source 1..19: mol_type = other RNA
ttaaggtctgcactgattg

SEQ ID NO: 7786 - RNA, 19 nt, synthetic construct
  source 1..19: mol_type = other RNA
tttaaggtctgcactgatt

SEQ ID NO: 7787 - RNA, 19 nt, synthetic construct
  source 1..19: mol_type = other RNA
ttttaaggtctgcactgat

SEQ ID NO: 7788 - RNA, 19 nt, synthetic construct
  source 1..19: mol_type = other RNA
cttttaaggtctgcactga

SEQ ID NO: 7789 - RNA, 19 nt, synthetic construct
  source 1..19: mol_type = other RNA
tcttttaaggtctgcactg

SEQ ID NO: 7790 - RNA, 19 nt, synthetic construct
  source 1..19: mol_type = other RNA
atcttttaaggtctgcact

SEQ ID NO: 7791 - RNA, 19 nt, synthetic construct
  source 1..19: mol_type = other RNA
aatcttttaaggtctgcac

SEQ ID NO: 7792 - RNA, 19 nt, synthetic construct
  source 1..19: mol_type = other RNA
aaatcttttaaggtctgca

SEQ ID NO: 7793 - RNA, 19 nt, synthetic construct
  source 1..19: mol_type = other RNA
gaaatcttttaaggtctgc

SEQ ID NO: 7794 - RNA, 19 nt, synthetic construct
  source 1..19: mol_type = other RNA
cgaaatcttttaaggtctg

SEQ ID NO: 7795 - RNA, 19 nt, synthetic construct
  source 1..19: mol_type = other RNA
gcgaaatcttttaaggtct

SEQ ID NO: 7796 - RNA, 19 nt, synthetic construct
  source 1..19: mol_type = other RNA
tgcgaaatcttttaaggtc

SEQ ID NO: 7797 - RNA, 19 nt, synthetic construct
  source 1..19: mol_type = other RNA
ttgcgaaatcttttaaggt

SEQ ID NO: 7798 - RNA, 19 nt, synthetic construct
  source 1..19: mol_type = other RNA
cttgcgaaatcttttaagg

SEQ ID NO: 7799 - RNA, 19 nt, synthetic construct
  source 1..19: mol_type = other RNA
ccttgcgaaatcttttaag

SEQ ID NO: 7800 - RNA, 19 nt, synthetic construct
  source 1..19: mol_type = other RNA
tccttgcgaaatcttttaa

SEQ ID NO: 7801 - RNA, 19 nt, synthetic construct
  source 1..19: mol_type = other RNA
ttccttgcgaaatctttta

SEQ ID NO: 7802 - RNA, 19 nt, synthetic construct
  source 1..19: mol_type = other RNA
attccttgcgaaatctttt

SEQ ID NO: 7803 - RNA, 19 nt, synthetic construct
  source 1..19: mol_type = other RNA
tattccttgcgaaatcttt

SEQ ID NO: 7804 - RNA, 19 nt, synthetic construct
  source 1..19: mol_type = other RNA
atattccttgcgaaatctt

SEQ ID NO: 7805 - RNA, 19 nt, synthetic construct
  source 1..19: mol_type = other RNA
catattccttgcgaaatct

SEQ ID NO: 7806 - RNA, 19 nt, synthetic construct
  source 1..19: mol_type = other RNA
acatattccttgcgaaatc

SEQ ID NO: 7807 - RNA, 19 nt, synthetic construct
  source 1..19: mol_type = other RNA
gacatattccttgcgaaat

SEQ ID NO: 7808 - RNA, 19 nt, synthetic construct
  source 1..19: mol_type = other RNA
ggacatattccttgcgaaa

SEQ ID NO: 7809 - RNA, 19 nt, synthetic construct
  source 1..19: mol_type = other RNA
tggacatattccttgcgaa

SEQ ID NO: 7810 - RNA, 19 nt, synthetic construct
  source 1..19: mol_type = other RNA
ttggacatattccttgcga

SEQ ID NO: 7811 - RNA, 19 nt, synthetic construct
  source 1..19: mol_type = other RNA
gttggacatattccttgcg

SEQ ID NO: 7812 - RNA, 19 nt, synthetic construct
  source 1..19: mol_type = other RNA
ggttggacatattccttgc

SEQ ID NO: 7813 - RNA, 19 nt, synthetic construct
  source 1..19: mol_type = other RNA
tggttggacatattccttg

SEQ ID NO: 7814 - RNA, 19 nt, synthetic construct
  source 1..19: mol_type = other RNA
ctggttggacatattcctt

SEQ ID NO: 7815 - RNA, 19 nt, synthetic construct
  source 1..19: mol_type = other RNA
actggttggacatattcct

SEQ ID NO: 7816 - RNA, 19 nt, synthetic construct
  source 1..19: mol_type = other RNA
tactggttggacatattcc

SEQ ID NO: 7817 - RNA, 19 nt, synthetic construct
  source 1..19: mol_type = other RNA
gtactggttggacatattc

SEQ ID NO: 7818 - RNA, 19 nt, synthetic construct
  source 1..19: mol_type = other RNA
tgtactggttggacatatt

SEQ ID NO: 7819 - RNA, 19 nt, synthetic construct
  source 1..19: mol_type = other RNA
ttgtactggttggacatat

SEQ ID NO: 7820 - RNA, 19 nt, synthetic construct
  source 1..19: mol_type = other RNA
gttgtactggttggacata

SEQ ID NO: 7821 - RNA, 19 nt, synthetic construct
  source 1..19: mol_type = other RNA
agttgtactggttggacat

SEQ ID NO: 7822 - RNA, 19 nt, synthetic construct
  source 1..19: mol_type = other RNA
aagttgtactggttggaca

SEQ ID NO: 7823 - RNA, 19 nt, synthetic construct
  source 1..19: mol_type = other RNA
taagttgtactggttggac

SEQ ID NO: 7824 - RNA, 19 nt, synthetic construct
  source 1..19: mol_type = other RNA
ctaagttgtactggttgga

SEQ ID NO: 7825 - RNA, 19 nt, synthetic construct
  source 1..19: mol_type = other RNA
cctaagttgtactggttgg

SEQ ID NO: 7826 - RNA, 19 nt, synthetic construct
  source 1..19: mol_type = other RNA
tcctaagttgtactggttg

SEQ ID NO: 7827 - RNA, 19 nt, synthetic construct
  source 1..19: mol_type = other RNA
atcctaagttgtactggtt

SEQ ID NO: 7828 - RNA, 19 nt, synthetic construct
  source 1..19: mol_type = other RNA
gatcctaagttgtactggt

SEQ ID NO: 7829 - RNA, 19 nt, synthetic construct
  source 1..19: mol_type = other RNA
agatcctaagttgtactgg

SEQ ID NO: 7830 - RNA, 19 nt, synthetic construct
  source 1..19: mol_type = other RNA
aagatcctaagttgtactg

SEQ ID NO: 7831 - RNA, 19 nt, synthetic construct
  source 1..19: mol_type = other RNA
taagatcctaagttgtact

SEQ ID NO: 7832 - RNA, 19 nt, synthetic construct
  source 1..19: mol_type = other RNA
ttaagatcctaagttgtac

SEQ ID NO: 7833 - RNA, 19 nt, synthetic construct
  source 1..19: mol_type = other RNA
tttaagatcctaagttgta

SEQ ID NO: 7834 - RNA, 19 nt, synthetic construct
  source 1..19: mol_type = other RNA
atttaagatcctaagttgt

SEQ ID NO: 7835 - RNA, 19 nt, synthetic construct
  source 1..19: mol_type = other RNA
catttaagatcctaagttg

SEQ ID NO: 7836 - RNA, 19 nt, synthetic construct
  source 1..19: mol_type = other RNA
acatttaagatcctaagtt

SEQ ID NO: 7837 - RNA, 19 nt, synthetic construct
  source 1..19: mol_type = other RNA
tacatttaagatcctaagt

SEQ ID NO: 7838 - RNA, 19 nt, synthetic construct
  source 1..19: mol_type = other RNA
atacatttaagatcctaag

SEQ ID NO: 7839 - RNA, 19 nt, synthetic construct
  source 1..19: mol_type = other RNA
aatacatttaagatcctaa

SEQ ID NO: 7840 - RNA, 19 nt, synthetic construct
  source 1..19: mol_type = other RNA
aaatacatttaagatccta

SEQ ID NO: 7841 - RNA, 19 nt, synthetic construct
  source 1..19: mol_type = other RNA
gaaatacatttaagatcct

SEQ ID NO: 7842 - RNA, 19 nt, synthetic construct
  source 1..19: mol_type = other RNA
cgaaatacatttaagatcc

SEQ ID NO: 7843 - RNA, 19 nt, synthetic construct
  source 1..19: mol_type = other RNA
ccgaaatacatttaagatc

SEQ ID NO: 7844 - RNA, 19 nt, synthetic construct
  source 1..19: mol_type = other RNA
gccgaaatacatttaagat

SEQ ID NO: 7845 - RNA, 19 nt, synthetic construct
  source 1..19: mol_type = other RNA
tgccgaaatacatttaaga

SEQ ID NO: 7846 - RNA, 19 nt, synthetic construct
  source 1..19: mol_type = other RNA
atgccgaaatacatttaag

SEQ ID NO: 7847 - RNA, 19 nt, synthetic construct
  source 1..19: mol_type = other RNA
aatgccgaaatacatttaa

SEQ ID NO: 7848 - RNA, 19 nt, synthetic construct
  source 1..19: mol_type = other RNA
caatgccgaaatacattta

SEQ ID NO: 7849 - RNA, 19 nt, synthetic construct
  source 1..19: mol_type = other RNA
ccaatgccgaaatacattt

SEQ ID NO: 7850 - RNA, 19 nt, synthetic construct
  source 1..19: mol_type = other RNA
cccaatgccgaaatacatt

SEQ ID NO: 7851 - RNA, 19 nt, synthetic construct
  source 1..19: mol_type = other RNA
acccaatgccgaaatacat

SEQ ID NO: 7852 - RNA, 19 nt, synthetic construct
  source 1..19: mol_type = other RNA
aacccaatgccgaaataca

SEQ ID NO: 7853 - RNA, 19 nt, synthetic construct
  source 1..19: mol_type = other RNA
caacccaatgccgaaatac

SEQ ID NO: 7854 - RNA, 19 nt, synthetic construct
  source 1..19: mol_type = other RNA
tcaacccaatgccgaaata

SEQ ID NO: 7855 - RNA, 19 nt, synthetic construct
  source 1..19: mol_type = other RNA
ttcaacccaatgccgaaat

SEQ ID NO: 7856 - RNA, 19 nt, synthetic construct
  source 1..19: mol_type = other RNA
gttcaacccaatgccgaaa

SEQ ID NO: 7857 - RNA, 19 nt, synthetic construct
  source 1..19: mol_type = other RNA
tgttcaacccaatgccgaa

SEQ ID NO: 7858 - RNA, 19 nt, synthetic construct
  source 1..19: mol_type = other RNA
atgttcaacccaatgccga

SEQ ID NO: 7859 - RNA, 19 nt, synthetic construct
  source 1..19: mol_type = other RNA
gatgttcaacccaatgccg

SEQ ID NO: 7860 - RNA, 19 nt, synthetic construct
  source 1..19: mol_type = other RNA
tgatgttcaacccaatgcc

SEQ ID NO: 7861 - RNA, 19 nt, synthetic construct
  source 1..19: mol_type = other RNA
atgatgttcaacccaatgc

SEQ ID NO: 7862 - RNA, 19 nt, synthetic construct
  source 1..19: mol_type = other RNA
aatgatgttcaacccaatg

SEQ ID NO: 7863 - RNA, 19 nt, synthetic construct
  source 1..19: mol_type = other RNA
aaatgatgttcaacccaat

SEQ ID NO: 7864 - RNA, 19 nt, synthetic construct
  source 1..19: mol_type = other RNA
aaaatgatgttcaacccaa

SEQ ID NO: 7865 - RNA, 19 nt, synthetic construct
  source 1..19: mol_type = other RNA
aaaaatgatgttcaaccca

SEQ ID NO: 7866 - RNA, 19 nt, synthetic construct
  source 1..19: mol_type = other RNA
taaaaatgatgttcaaccc

SEQ ID NO: 7867 - RNA, 19 nt, synthetic construct
  source 1..19: mol_type = other RNA
ataaaaatgatgttcaacc

SEQ ID NO: 7868 - RNA, 19 nt, synthetic construct
  source 1..19: mol_type = other RNA
cataaaaatgatgttcaac

SEQ ID NO: 7869 - RNA, 19 nt, synthetic construct
  source 1..19: mol_type = other RNA
tcataaaaatgatgttcaa

SEQ ID NO: 7870 - RNA, 19 nt, synthetic construct
  source 1..19: mol_type = other RNA
gtcataaaaatgatgttca

SEQ ID NO: 7871 - RNA, 19 nt, synthetic construct
  source 1..19: mol_type = other RNA
agtcataaaaatgatgttc

SEQ ID NO: 7872 - RNA, 19 nt, synthetic construct
  source 1..19: mol_type = other RNA
aagtcataaaaatgatgtt

SEQ ID NO: 7873 - RNA, 19 nt, synthetic construct
  source 1..19: mol_type = other RNA
aaagtcataaaaatgatgt

SEQ ID NO: 7874 - RNA, 19 nt, synthetic construct
  source 1..19: mol_type = other RNA
caaagtcataaaaatgatg

SEQ ID NO: 7875 - RNA, 19 nt, synthetic construct
  source 1..19: mol_type = other RNA
tcaaagtcataaaaatgat

SEQ ID NO: 7876 - RNA, 19 nt, synthetic construct
  source 1..19: mol_type = other RNA
ttcaaagtcataaaaatga

SEQ ID NO: 7877 - RNA, 19 nt, synthetic construct
  source 1..19: mol_type = other RNA
tttcaaagtcataaaaatg

SEQ ID NO: 7878 - RNA, 19 nt, synthetic construct
  source 1..19: mol_type = other RNA
ctttcaaagtcataaaaat

SEQ ID NO: 7879 - RNA, 19 nt, synthetic construct
  source 1..19: mol_type = other RNA
tctttcaaagtcataaaaa

SEQ ID NO: 7880 - RNA, 19 nt, synthetic construct
  source 1..19: mol_type = other RNA
ctctttcaaagtcataaaa

SEQ ID NO: 7881 - RNA, 19 nt, synthetic construct
  source 1..19: mol_type = other RNA
tctctttcaaagtcataaa

SEQ ID NO: 7882 - RNA, 19 nt, synthetic construct
  source 1..19: mol_type = other RNA
gtctctttcaaagtcataa

SEQ ID NO: 7883 - RNA, 19 nt, synthetic construct
  source 1..19: mol_type = other RNA
agtctctttcaaagtcata

SEQ ID NO: 7884 - RNA, 19 nt, synthetic construct
  source 1..19: mol_type = other RNA
aagtctctttcaaagtcat

SEQ ID NO: 7885 - RNA, 19 nt, synthetic construct
  source 1..19: mol_type = other RNA
caagtctctttcaaagtca

SEQ ID NO: 7886 - RNA, 19 nt, synthetic construct
  source 1..19: mol_type = other RNA
ccaagtctctttcaaagtc

SEQ ID NO: 7887 - RNA, 19 nt, synthetic construct
  source 1..19: mol_type = other RNA
tccaagtctctttcaaagt

SEQ ID NO: 7888 - RNA, 19 nt, synthetic construct
  source 1..19: mol_type = other RNA
ttccaagtctctttcaaag

SEQ ID NO: 7889 - RNA, 19 nt, synthetic construct
  source 1..19: mol_type = other RNA
attccaagtctctttcaaa

SEQ ID NO: 7890 - RNA, 19 nt, synthetic construct
  source 1..19: mol_type = other RNA
aattccaagtctctttcaa

SEQ ID NO: 7891 - RNA, 19 nt, synthetic construct
  source 1..19: mol_type = other RNA
caattccaagtctctttca

SEQ ID NO: 7892 - RNA, 19 nt, synthetic construct
  source 1..19: mol_type = other RNA
gcaattccaagtctctttc

SEQ ID NO: 7893 - RNA, 19 nt, synthetic construct
  source 1..19: mol_type = other RNA
agcaattccaagtctcttt

SEQ ID NO: 7894 - RNA, 19 nt, synthetic construct
  source 1..19: mol_type = other RNA
aagcaattccaagtctctt

SEQ ID NO: 7895 - RNA, 19 nt, synthetic construct
  source 1..19: mol_type = other RNA
caagcaattccaagtctct

SEQ ID NO: 7896 - RNA, 19 nt, synthetic construct
  source 1..19: mol_type = other RNA
tcaagcaattccaagtctc

SEQ ID NO: 7897 - RNA, 19 nt, synthetic construct
  source 1..19: mol_type = other RNA
ttcaagcaattccaagtct

SEQ ID NO: 7898 - RNA, 19 nt, synthetic construct
  source 1..19: mol_type = other RNA
tttcaagcaattccaagtc

SEQ ID NO: 7899 - RNA, 19 nt, synthetic construct
  source 1..19: mol_type = other RNA
ctttcaagcaattccaagt

SEQ ID NO: 7900 - RNA, 19 nt, synthetic construct
  source 1..19: mol_type = other RNA
tctttcaagcaattccaag

SEQ ID NO: 7901 - RNA, 19 nt, synthetic construct
  source 1..19: mol_type = other RNA
gtctttcaagcaattccaa

SEQ ID NO: 7902 - RNA, 19 nt, synthetic construct
  source 1..19: mol_type = other RNA
agtctttcaagcaattcca

SEQ ID NO: 7903 - RNA, 19 nt, synthetic construct
  source 1..19: mol_type = other RNA
tagtctttcaagcaattcc

SEQ ID NO: 7904 - RNA, 19 nt, synthetic construct
  source 1..19: mol_type = other RNA
ctagtctttcaagcaattc

SEQ ID NO: 7905 - RNA, 19 nt, synthetic construct
  source 1..19: mol_type = other RNA
tctagtctttcaagcaatt

SEQ ID NO: 7906 - RNA, 19 nt, synthetic construct
  source 1..19: mol_type = other RNA
ttctagtctttcaagcaat

SEQ ID NO: 7907 - RNA, 19 nt, synthetic construct
  source 1..19: mol_type = other RNA
attctagtctttcaagcaa

SEQ ID NO: 7908 - RNA, 19 nt, synthetic construct
  source 1..19: mol_type = other RNA
gattctagtctttcaagca

SEQ ID NO: 7909 - RNA, 19 nt, synthetic construct
  source 1..19: mol_type = other RNA
ggattctagtctttcaagc

SEQ ID NO: 7910 - RNA, 19 nt, synthetic construct
  source 1..19: mol_type = other RNA
aggattctagtctttcaag

SEQ ID NO: 7911 - RNA, 19 nt, synthetic construct
  source 1..19: mol_type = other RNA
aaggattctagtctttcaa

SEQ ID NO: 7912 - RNA, 19 nt, synthetic construct
  source 1..19: mol_type = other RNA
gaaggattctagtctttca

SEQ ID NO: 7913 - RNA, 19 nt, synthetic construct
  source 1..19: mol_type = other RNA
tgaaggattctagtctttc

SEQ ID NO: 7914 - RNA, 19 nt, synthetic construct
  source 1..19: mol_type = other RNA
atgaaggattctagtcttt

SEQ ID NO: 7915 - RNA, 19 nt, synthetic construct
  source 1..19: mol_type = other RNA
aatgaaggattctagtctt

SEQ ID NO: 7916 - RNA, 19 nt, synthetic construct
  source 1..19: mol_type = other RNA
aaatgaaggattctagtct

SEQ ID NO: 7917 - RNA, 19 nt, synthetic construct
  source 1..19: mol_type = other RNA
gaaatgaaggattctagtc

SEQ ID NO: 7918 - RNA, 19 nt, synthetic construct
  source 1..19: mol_type = other RNA
tgaaatgaaggattctagt

SEQ ID NO: 7919 - RNA, 19 nt, synthetic construct
  source 1..19: mol_type = other RNA
ttgaaatgaaggattctag

SEQ ID NO: 7920 - RNA, 19 nt, synthetic construct
  source 1..19: mol_type = other RNA
cttgaaatgaaggattcta

SEQ ID NO: 7921 - RNA, 19 nt, synthetic construct
  source 1..19: mol_type = other RNA
acttgaaatgaaggattct

SEQ ID NO: 7922 - RNA, 19 nt, synthetic construct
  source 1..19: mol_type = other RNA
cacttgaaatgaaggattc

SEQ ID NO: 7923 - RNA, 19 nt, synthetic construct
  source 1..19: mol_type = other RNA
acacttgaaatgaaggatt

SEQ ID NO: 7924 - RNA, 19 nt, synthetic construct
  source 1..19: mol_type = other RNA
tacacttgaaatgaaggat

SEQ ID NO: 7925 - RNA, 19 nt, synthetic construct
  source 1..19: mol_type = other RNA
ttacacttgaaatgaagga

SEQ ID NO: 7926 - RNA, 19 nt, synthetic construct
  source 1..19: mol_type = other RNA
cttacacttgaaatgaagg

SEQ ID NO: 7927 - RNA, 19 nt, synthetic construct
  source 1..19: mol_type = other RNA
tcttacacttgaaatgaag

SEQ ID NO: 7928 - RNA, 19 nt, synthetic construct
  source 1..19: mol_type = other RNA
ctcttacacttgaaatgaa

SEQ ID NO: 7929 - RNA, 19 nt, synthetic construct
  source 1..19: mol_type = other RNA
cctcttacacttgaaatga

SEQ ID NO: 7930 - RNA, 19 nt, synthetic construct
  source 1..19: mol_type = other RNA
ccctcttacacttgaaatg

SEQ ID NO: 7931 - RNA, 19 nt, synthetic construct
  source 1..19: mol_type = other RNA
tccctcttacacttgaaat

SEQ ID NO: 7932 - RNA, 19 nt, synthetic construct
  source 1..19: mol_type = other RNA
ttccctcttacacttgaaa

SEQ ID NO: 7933 - RNA, 19 nt, synthetic construct
  source 1..19: mol_type = other RNA
tttccctcttacacttgaa

SEQ ID NO: 7934 - RNA, 19 nt, synthetic construct
  source 1..19: mol_type = other RNA
ctttccctcttacacttga

SEQ ID NO: 7935 - RNA, 19 nt, synthetic construct
  source 1..19: mol_type = other RNA
gctttccctcttacacttg

SEQ ID NO: 7936 - RNA, 19 nt, synthetic construct
  source 1..19: mol_type = other RNA
agctttccctcttacactt

SEQ ID NO: 7937 - RNA, 19 nt, synthetic construct
  source 1..19: mol_type = other RNA
tagctttccctcttacact

SEQ ID NO: 7938 - RNA, 19 nt, synthetic construct
  source 1..19: mol_type = other RNA
atagctttccctcttacac

SEQ ID NO: 7939 - RNA, 19 nt, synthetic construct
  source 1..19: mol_type = other RNA
catagctttccctcttaca

SEQ ID NO: 7940 - RNA, 19 nt, synthetic construct
  source 1..19: mol_type = other RNA
tcatagctttccctcttac

SEQ ID NO: 7941 - RNA, 19 nt, synthetic construct
  source 1..19: mol_type = other RNA
ttcatagctttccctctta

SEQ ID NO: 7942 - RNA, 19 nt, synthetic construct
  source 1..19: mol_type = other RNA
tttcatagctttccctctt

SEQ ID NO: 7943 - RNA, 19 nt, synthetic construct
  source 1..19: mol_type = other RNA
ttttcatagctttccctct

SEQ ID NO: 7944 - RNA, 19 nt, synthetic construct
  source 1..19: mol_type = other RNA
tttttcatagctttccctc

SEQ ID NO: 7945 - RNA, 19 nt, synthetic construct
  source 1..19: mol_type = other RNA
ttttttcatagctttccct

SEQ ID NO: 7946 - RNA, 19 nt, synthetic construct
  source 1..19: mol_type = other RNA
attttttcatagctttccc

SEQ ID NO: 7947 - RNA, 19 nt, synthetic construct
  source 1..19: mol_type = other RNA
cattttttcatagctttcc

SEQ ID NO: 7948 - RNA, 19 nt, synthetic construct
  source 1..19: mol_type = other RNA
ccattttttcatagctttc

SEQ ID NO: 7949 - RNA, 19 nt, synthetic construct
  source 1..19: mol_type = other RNA
cccattttttcatagcttt

SEQ ID NO: 7950 - RNA, 19 nt, synthetic construct
  source 1..19: mol_type = other RNA
acccattttttcatagctt

SEQ ID NO: 7951 - RNA, 19 nt, synthetic construct
  source 1..19: mol_type = other RNA
tacccattttttcatagct

SEQ ID NO: 7952 - RNA, 19 nt, synthetic construct
  source 1..19: mol_type = other RNA
ctacccattttttcatagc

SEQ ID NO: 7953 - RNA, 19 nt, synthetic construct
  source 1..19: mol_type = other RNA
tctacccattttttcatag

SEQ ID NO: 7954 - RNA, 19 nt, synthetic construct
  source 1..19: mol_type = other RNA
ctctacccattttttcata

SEQ ID NO: 7955 - RNA, 19 nt, synthetic construct
  source 1..19: mol_type = other RNA
actctacccattttttcat

SEQ ID NO: 7956 - RNA, 19 nt, synthetic construct
  source 1..19: mol_type = other RNA
gactctacccattttttca

SEQ ID NO: 7957 - RNA, 19 nt, synthetic construct
  source 1..19: mol_type = other RNA
tgactctacccattttttc

SEQ ID NO: 7958 - RNA, 19 nt, synthetic construct
  source 1..19: mol_type = other RNA
ttgactctacccatttttt

SEQ ID NO: 7959 - RNA, 19 nt, synthetic construct
  source 1..19: mol_type = other RNA
attgactctacccattttt

SEQ ID NO: 7960 - RNA, 19 nt, synthetic construct
  source 1..19: mol_type = other RNA
aattgactctacccatttt

SEQ ID NO: 7961 - RNA, 19 nt, synthetic construct
  source 1..19: mol_type = other RNA
caattgactctacccattt

SEQ ID NO: 7962 - RNA, 19 nt, synthetic construct
  source 1..19: mol_type = other RNA
gcaattgactctacccatt

SEQ ID NO: 7963 - RNA, 19 nt, synthetic construct
  source 1..19: mol_type = other RNA
agcaattgactctacccat

SEQ ID NO: 7964 - RNA, 19 nt, synthetic construct
  source 1..19: mol_type = other RNA
tagcaattgactctaccca

SEQ ID NO: 7965 - RNA, 19 nt, synthetic construct
  source 1..19: mol_type = other RNA
ttagcaattgactctaccc

SEQ ID NO: 7966 - RNA, 19 nt, synthetic construct
  source 1..19: mol_type = other RNA
cttagcaattgactctacc

SEQ ID NO: 7967 - RNA, 19 nt, synthetic construct
  source 1..19: mol_type = other RNA
tcttagcaattgactctac

SEQ ID NO: 7968 - RNA, 19 nt, synthetic construct
  source 1..19: mol_type = other RNA
atcttagcaattgactcta

SEQ ID NO: 7969 - RNA, 19 nt, synthetic construct
  source 1..19: mol_type = other RNA
gatcttagcaattgactct

SEQ ID NO: 7970 - RNA, 19 nt, synthetic construct
  source 1..19: mol_type = other RNA
tgatcttagcaattgactc

SEQ ID NO: 7971 - RNA, 19 nt, synthetic construct
  source 1..19: mol_type = other RNA
atgatcttagcaattgact

SEQ ID NO: 7972 - RNA, 19 nt, synthetic construct
  source 1..19: mol_type = other RNA
gatgatcttagcaattgac

SEQ ID NO: 7973 - RNA, 19 nt, synthetic construct
  source 1..19: mol_type = other RNA
tgatgatcttagcaattga

SEQ ID NO: 7974 - RNA, 19 nt, synthetic construct
  source 1..19: mol_type = other RNA
ctgatgatcttagcaattg

SEQ ID NO: 7975 - RNA, 19 nt, synthetic construct
  source 1..19: mol_type = other RNA
cctgatgatcttagcaatt

SEQ ID NO: 7976 - RNA, 19 nt, synthetic construct
  source 1..19: mol_type = other RNA
tcctgatgatcttagcaat

SEQ ID NO: 7977 - RNA, 19 nt, synthetic construct
  source 1..19: mol_type = other RNA
ctcctgatgatcttagcaa

SEQ ID NO: 7978 - RNA, 19 nt, synthetic construct
  source 1..19: mol_type = other RNA
cctcctgatgatcttagca

SEQ ID NO: 7979 - RNA, 19 nt, synthetic construct
  source 1..19: mol_type = other RNA
tcctcctgatgatcttagc

SEQ ID NO: 7980 - RNA, 19 nt, synthetic construct
  source 1..19: mol_type = other RNA
ttcctcctgatgatcttag

SEQ ID NO: 7981 - RNA, 19 nt, synthetic construct
  source 1..19: mol_type = other RNA
cttcctcctgatgatctta

SEQ ID NO: 7982 - RNA, 19 nt, synthetic construct
  source 1..19: mol_type = other RNA
tcttcctcctgatgatctt

SEQ ID NO: 7983 - RNA, 19 nt, synthetic construct
  source 1..19: mol_type = other RNA
ttcttcctcctgatgatct

SEQ ID NO: 7984 - RNA, 19 nt, synthetic construct
  source 1..19: mol_type = other RNA
cttcttcctcctgatgatc

SEQ ID NO: 7985 - RNA, 19 nt, synthetic construct
  source 1..19: mol_type = other RNA
gcttcttcctcctgatgat

SEQ ID NO: 7986 - RNA, 19 nt, synthetic construct
  source 1..19: mol_type = other RNA
tgcttcttcctcctgatga

SEQ ID NO: 7987 - RNA, 19 nt, synthetic construct
  source 1..19: mol_type = other RNA
ttgcttcttcctcctgatg

SEQ ID NO: 7988 - RNA, 19 nt, synthetic construct
  source 1..19: mol_type = other RNA
cttgcttcttcctcctgat

SEQ ID NO: 7989 - RNA, 19 nt, synthetic construct
  source 1..19: mol_type = other RNA
gcttgcttcttcctcctga

SEQ ID NO: 7990 - RNA, 19 nt, synthetic construct
  source 1..19: mol_type = other RNA
agcttgcttcttcctcctg

SEQ ID NO: 7991 - RNA, 19 nt, synthetic construct
  source 1..19: mol_type = other RNA
gagcttgcttcttcctcct

SEQ ID NO: 7992 - RNA, 19 nt, synthetic construct
  source 1..19: mol_type = other RNA
tgagcttgcttcttcctcc

SEQ ID NO: 7993 - RNA, 19 nt, synthetic construct
  source 1..19: mol_type = other RNA
ctgagcttgcttcttcctc

SEQ ID NO: 7994 - RNA, 19 nt, synthetic construct
  source 1..19: mol_type = other RNA
cctgagcttgcttcttcct

SEQ ID NO: 7995 - RNA, 19 nt, synthetic construct
  source 1..19: mol_type = other RNA
gcctgagcttgcttcttcc

SEQ ID NO: 7996 - RNA, 19 nt, synthetic construct
  source 1..19: mol_type = other RNA
tgcctgagcttgcttcttc

SEQ ID NO: 7997 - RNA, 19 nt, synthetic construct
  source 1..19: mol_type = other RNA
ttgcctgagcttgcttctt

SEQ ID NO: 7998 - RNA, 19 nt, synthetic construct
  source 1..19: mol_type = other RNA
tttgcctgagcttgcttct

SEQ ID NO: 7999 - RNA, 19 nt, synthetic construct
  source 1..19: mol_type = other RNA
gtttgcctgagcttgcttc

SEQ ID NO: 8000 - RNA, 19 nt, synthetic construct
  source 1..19: mol_type = other RNA
cgtttgcctgagcttgctt

SEQ ID NO: 8001 - RNA, 19 nt, synthetic construct
  source 1..19: mol_type = other RNA
ccgtttgcctgagcttgct

SEQ ID NO: 8002 - RNA, 19 nt, synthetic construct
  source 1..19: mol_type = other RNA
tccgtttgcctgagcttgc

SEQ ID NO: 8003 - RNA, 19 nt, synthetic construct
  source 1..19: mol_type = other RNA
ctccgtttgcctgagcttg

SEQ ID NO: 8004 - RNA, 19 nt, synthetic construct
  source 1..19: mol_type = other RNA
actccgtttgcctgagctt

SEQ ID NO: 8005 - RNA, 19 nt, synthetic construct
  source 1..19: mol_type = other RNA
tactccgtttgcctgagct

SEQ ID NO: 8006 - RNA, 19 nt, synthetic construct
  source 1..19: mol_type = other RNA
ttactccgtttgcctgagc

SEQ ID NO: 8007 - RNA, 19 nt, synthetic construct
  source 1..19: mol_type = other RNA
cttactccgtttgcctgag

SEQ ID NO: 8008 - RNA, 19 nt, synthetic construct
  source 1..19: mol_type = other RNA
gcttactccgtttgcctga

SEQ ID NO: 8009 - RNA, 19 nt, synthetic construct
  source 1..19: mol_type = other RNA
ggcttactccgtttgcctg

SEQ ID NO: 8010 - RNA, 19 nt, synthetic construct
  source 1..19: mol_type = other RNA
tggcttactccgtttgcct

SEQ ID NO: 8011 - RNA, 19 nt, synthetic construct
  source 1..19: mol_type = other RNA
atggcttactccgtttgcc

SEQ ID NO: 8012 - RNA, 19 nt, synthetic construct
  source 1..19: mol_type = other RNA
tatggcttactccgtttgc

SEQ ID NO: 8013 - RNA, 19 nt, synthetic construct
  source 1..19: mol_type = other RNA
ttatggcttactccgtttg

SEQ ID NO: 8014 - RNA, 19 nt, synthetic construct
  source 1..19: mol_type = other RNA
attatggcttactccgttt

SEQ ID NO: 8015 - RNA, 19 nt, synthetic construct
  source 1..19: mol_type = other RNA
tattatggcttactccgtt

SEQ ID NO: 8016 - RNA, 19 nt, synthetic construct
  source 1..19: mol_type = other RNA
atattatggcttactccgt

SEQ ID NO: 8017 - RNA, 19 nt, synthetic construct
  source 1..19: mol_type = other RNA
aatattatggcttactccg

SEQ ID NO: 8018 - RNA, 19 nt, synthetic construct
  source 1..19: mol_type = other RNA
taatattatggcttactcc

SEQ ID NO: 8019 - RNA, 19 nt, synthetic construct
  source 1..19: mol_type = other RNA
gtaatattatggcttactc

SEQ ID NO: 8020 - RNA, 19 nt, synthetic construct
  source 1..19: mol_type = other RNA
ggtaatattatggcttact

SEQ ID NO: 8021 - RNA, 19 nt, synthetic construct
  source 1..19: mol_type = other RNA
aggtaatattatggcttac

SEQ ID NO: 8022 - RNA, 19 nt, synthetic construct
  source 1..19: mol_type = other RNA
aaggtaatattatggctta

SEQ ID NO: 8023 - RNA, 19 nt, synthetic construct
  source 1..19: mol_type = other RNA
aaaggtaatattatggctt

SEQ ID NO: 8024 - RNA, 19 nt, synthetic construct
  source 1..19: mol_type = other RNA
caaaggtaatattatggct

SEQ ID NO: 8025 - RNA, 19 nt, synthetic construct
  source 1..19: mol_type = other RNA
tcaaaggtaatattatggc

SEQ ID NO: 8026 - RNA, 19 nt, synthetic construct
  source 1..19: mol_type = other RNA
ttcaaaggtaatattatgg

SEQ ID NO: 8027 - RNA, 19 nt, synthetic construct
  source 1..19: mol_type = other RNA
tttcaaaggtaatattatg

SEQ ID NO: 8028 - RNA, 19 nt, synthetic construct
  source 1..19: mol_type = other RNA
ctttcaaaggtaatattat

SEQ ID NO: 8029 - RNA, 19 nt, synthetic construct
  source 1..19: mol_type = other RNA
actttcaaaggtaatatta

SEQ ID NO: 8030 - RNA, 19 nt, synthetic construct
  source 1..19: mol_type = other RNA
gactttcaaaggtaatatt

SEQ ID NO: 8031 - RNA, 19 nt, synthetic construct
  source 1..19: mol_type = other RNA
ggactttcaaaggtaatat

SEQ ID NO: 8032 - RNA, 19 nt, synthetic construct
  source 1..19: mol_type = other RNA
tggactttcaaaggtaata

SEQ ID NO: 8033 - RNA, 19 nt, synthetic construct
  source 1..19: mol_type = other RNA
gtggactttcaaaggtaat

SEQ ID NO: 8034 - RNA, 19 nt, synthetic construct
  source 1..19: mol_type = other RNA
ggtggactttcaaaggtaa

SEQ ID NO: 8035 - RNA, 19 nt, synthetic construct
  source 1..19: mol_type = other RNA
aggtggactttcaaaggta

SEQ ID NO: 8036 - RNA, 19 nt, synthetic construct
  source 1..19: mol_type = other RNA
gaggtggactttcaaaggt

SEQ ID NO: 8037 - RNA, 19 nt, synthetic construct
  source 1..19: mol_type = other RNA
ggaggtggactttcaaagg

SEQ ID NO: 8038 - RNA, 19 nt, synthetic construct
  source 1..19: mol_type = other RNA
tggaggtggactttcaaag

SEQ ID NO: 8039 - RNA, 19 nt, synthetic construct
  source 1..19: mol_type = other RNA
gtggaggtggactttcaaa

SEQ ID NO: 8040 - RNA, 19 nt, synthetic construct
  source 1..19: mol_type = other RNA
ggtggaggtggactttcaa

SEQ ID NO: 8041 - RNA, 19 nt, synthetic construct
  source 1..19: mol_type = other RNA
tggtggaggtggactttca

SEQ ID NO: 8042 - RNA, 19 nt, synthetic construct
  source 1..19: mol_type = other RNA
ttggtggaggtggactttc

SEQ ID NO: 8043 - RNA, 19 nt, synthetic construct
  source 1..19: mol_type = other RNA
attggtggaggtggacttt

SEQ ID NO: 8044 - RNA, 19 nt, synthetic construct
  source 1..19: mol_type = other RNA
aattggtggaggtggactt

SEQ ID NO: 8045 - RNA, 19 nt, synthetic construct
  source 1..19: mol_type = other RNA
caattggtggaggtggact

SEQ ID NO: 8046 - RNA, 19 nt, synthetic construct
  source 1..19: mol_type = other RNA
tcaattggtggaggtggac

SEQ ID NO: 8047 - RNA, 19 nt, synthetic construct
  source 1..19: mol_type = other RNA
ttcaattggtggaggtgga

SEQ ID NO: 8048 - RNA, 19 nt, synthetic construct
  source 1..19: mol_type = other RNA
attcaattggtggaggtgg

SEQ ID NO: 8049 - RNA, 19 nt, synthetic construct
  source 1..19: mol_type = other RNA
cattcaattggtggaggtg

SEQ ID NO: 8050 - RNA, 19 nt, synthetic construct
  source 1..19: mol_type = other RNA
ccattcaattggtggaggt

SEQ ID NO: 8051 - RNA, 19 nt, synthetic construct
  source 1..19: mol_type = other RNA
gccattcaattggtggagg

SEQ ID NO: 8052 - RNA, 19 nt, synthetic construct
  source 1..19: mol_type = other RNA
tgccattcaattggtggag

SEQ ID NO: 8053 - RNA, 19 nt, synthetic construct
  source 1..19: mol_type = other RNA
atgccattcaattggtgga

SEQ ID NO: 8054 - RNA, 19 nt, synthetic construct
  source 1..19: mol_type = other RNA
tatgccattcaattggtgg

SEQ ID NO: 8055 - RNA, 19 nt, synthetic construct
  source 1..19: mol_type = other RNA
atatgccattcaattggtg

SEQ ID NO: 8056 - RNA, 19 nt, synthetic construct
  source 1..19: mol_type = other RNA
gatatgccattcaattggt

SEQ ID NO: 8057 - RNA, 19 nt, synthetic construct
  source 1..19: mol_type = other RNA
tgatatgccattcaattgg

SEQ ID NO: 8058 - RNA, 19 nt, synthetic construct
  source 1..19: mol_type = other RNA
ctgatatgccattcaattg

SEQ ID NO: 8059 - RNA, 19 nt, synthetic construct
  source 1..19: mol_type = other RNA
gctgatatgccattcaatt

SEQ ID NO: 8060 - RNA, 19 nt, synthetic construct
  source 1..19: mol_type = other RNA
tgctgatatgccattcaat

SEQ ID NO: 8061 - RNA, 19 nt, synthetic construct
  source 1..19: mol_type = other RNA
ttgctgatatgccattcaa

SEQ ID NO: 8062 - RNA, 19 nt, synthetic construct
  source 1..19: mol_type = other RNA
tttgctgatatgccattca

SEQ ID NO: 8063 - RNA, 19 nt, synthetic construct
  source 1..19: mol_type = other RNA
gtttgctgatatgccattc

SEQ ID NO: 8064 - RNA, 19 nt, synthetic construct
  source 1..19: mol_type = other RNA
ggtttgctgatatgccatt

SEQ ID NO: 8065 - RNA, 19 nt, synthetic construct
  source 1..19: mol_type = other RNA
tggtttgctgatatgccat

SEQ ID NO: 8066 - RNA, 19 nt, synthetic construct
  source 1..19: mol_type = other RNA
ctggtttgctgatatgcca

SEQ ID NO: 8067 - RNA, 19 nt, synthetic construct
  source 1..19: mol_type = other RNA
cctggtttgctgatatgcc

SEQ ID NO: 8068 - RNA, 19 nt, synthetic construct
  source 1..19: mol_type = other RNA
tcctggtttgctgatatgc

SEQ ID NO: 8069 - RNA, 19 nt, synthetic construct
  source 1..19: mol_type = other RNA
gtcctggtttgctgatatg

SEQ ID NO: 8070 - RNA, 19 nt, synthetic construct
  source 1..19: mol_type = other RNA
tgtcctggtttgctgatat

SEQ ID NO: 8071 - RNA, 19 nt, synthetic construct
  source 1..19: mol_type = other RNA
ctgtcctggtttgctgata

SEQ ID NO: 8072 - RNA, 19 nt, synthetic construct
  source 1..19: mol_type = other RNA
actgtcctggtttgctgat

SEQ ID NO: 8073 - RNA, 19 nt, synthetic construct
  source 1..19: mol_type = other RNA
aactgtcctggtttgctga

SEQ ID NO: 8074 - RNA, 19 nt, synthetic construct
  source 1..19: mol_type = other RNA
aaactgtcctggtttgctg

SEQ ID NO: 8075 - RNA, 19 nt, synthetic construct
  source 1..19: mol_type = other RNA
caaactgtcctggtttgct

SEQ ID NO: 8076 - RNA, 19 nt, synthetic construct
  source 1..19: mol_type = other RNA
tcaaactgtcctggtttgc

SEQ ID NO: 8077 - RNA, 19 nt, synthetic construct
  source 1..19: mol_type = other RNA
ttcaaactgtcctggtttg

SEQ ID NO: 8078 - RNA, 19 nt, synthetic construct
  source 1..19: mol_type = other RNA
tttcaaactgtcctggttt

SEQ ID NO: 8079 - RNA, 19 nt, synthetic construct
  source 1..19: mol_type = other RNA
gtttcaaactgtcctggtt

SEQ ID NO: 8080 - RNA, 19 nt, synthetic construct
  source 1..19: mol_type = other RNA
tgtttcaaactgtcctggt

SEQ ID NO: 8081 - RNA, 19 nt, synthetic construct
  source 1..19: mol_type = other RNA
atgtttcaaactgtcctgg

SEQ ID NO: 8082 - RNA, 19 nt, synthetic construct
  source 1..19: mol_type = other RNA
aatgtttcaaactgtcctg

SEQ ID NO: 8083 - RNA, 19 nt, synthetic construct
  source 1..19: mol_type = other RNA
aaatgtttcaaactgtcct

SEQ ID NO: 8084 - RNA, 19 nt, synthetic construct
  source 1..19: mol_type = other RNA
caaatgtttcaaactgtcc

SEQ ID NO: 8085 - RNA, 19 nt, synthetic construct
  source 1..19: mol_type = other RNA
tcaaatgtttcaaactgtc

SEQ ID NO: 8086 - RNA, 19 nt, synthetic construct
  source 1..19: mol_type = other RNA
atcaaatgtttcaaactgt

SEQ ID NO: 8087 - RNA, 19 nt, synthetic construct
  source 1..19: mol_type = other RNA
gatcaaatgtttcaaactg

SEQ ID NO: 8088 - RNA, 19 nt, synthetic construct
  source 1..19: mol_type = other RNA
agatcaaatgtttcaaact

SEQ ID NO: 8089 - RNA, 19 nt, synthetic construct
  source 1..19: mol_type = other RNA
gagatcaaatgtttcaaac

SEQ ID NO: 8090 - RNA, 19 nt, synthetic construct
  source 1..19: mol_type = other RNA
tgagatcaaatgtttcaaa

SEQ ID NO: 8091 - RNA, 19 nt, synthetic construct
  source 1..19: mol_type = other RNA
atgagatcaaatgtttcaa

SEQ ID NO: 8092 - RNA, 19 nt, synthetic construct
  source 1..19: mol_type = other RNA
catgagatcaaatgtttca

SEQ ID NO: 8093 - RNA, 19 nt, synthetic construct
  source 1..19: mol_type = other RNA
tcatgagatcaaatgtttc

SEQ ID NO: 8094 - RNA, 19 nt, synthetic construct
  source 1..19: mol_type = other RNA
gtcatgagatcaaatgttt

SEQ ID NO: 8095 - RNA, 19 nt, synthetic construct
  source 1..19: mol_type = other RNA
tgtcatgagatcaaatgtt

SEQ ID NO: 8096 - RNA, 19 nt, synthetic construct
  source 1..19: mol_type = other RNA
gtgtcatgagatcaaatgt

SEQ ID NO: 8097 - RNA, 19 nt, synthetic construct
  source 1..19: mol_type = other RNA
agtgtcatgagatcaaatg

SEQ ID NO: 8098 - RNA, 19 nt, synthetic construct
  source 1..19: mol_type = other RNA
aagtgtcatgagatcaaat

SEQ ID NO: 8099 - RNA, 19 nt, synthetic construct
  source 1..19: mol_type = other RNA
gaagtgtcatgagatcaaa

SEQ ID NO: 8100 - RNA, 19 nt, synthetic construct
  source 1..19: mol_type = other RNA
tgaagtgtcatgagatcaa

SEQ ID NO: 8101 - RNA, 19 nt, synthetic construct
  source 1..19: mol_type = other RNA
atgaagtgtcatgagatca

SEQ ID NO: 8102 - RNA, 19 nt, synthetic construct
  source 1..19: mol_type = other RNA
gatgaagtgtcatgagatc

SEQ ID NO: 8103 - RNA, 19 nt, synthetic construct
  source 1..19: mol_type = other RNA
ggatgaagtgtcatgagat

SEQ ID NO: 8104 - RNA, 19 nt, synthetic construct
  source 1..19: mol_type = other RNA
tggatgaagtgtcatgaga

SEQ ID NO: 8105 - RNA, 19 nt, synthetic construct
  source 1..19: mol_type = other RNA
ttggatgaagtgtcatgag

SEQ ID NO: 8106 - RNA, 19 nt, synthetic construct
  source 1..19: mol_type = other RNA
attggatgaagtgtcatga

SEQ ID NO: 8107 - RNA, 19 nt, synthetic construct
  source 1..19: mol_type = other RNA
tattggatgaagtgtcatg

SEQ ID NO: 8108 - RNA, 19 nt, synthetic construct
  source 1..19: mol_type = other RNA
ctattggatgaagtgtcat

SEQ ID NO: 8109 - RNA, 19 nt, synthetic construct
  source 1..19: mol_type = other RNA
tctattggatgaagtgtca

SEQ ID NO: 8110 - RNA, 19 nt, synthetic construct
  source 1..19: mol_type = other RNA
ttctattggatgaagtgtc

SEQ ID NO: 8111 - RNA, 19 nt, synthetic construct
  source 1..19: mol_type = other RNA
tttctattggatgaagtgt

SEQ ID NO: 8112 - RNA, 19 nt, synthetic construct
  source 1..19: mol_type = other RNA
atttctattggatgaagtg

SEQ ID NO: 8113 - RNA, 19 nt, synthetic construct
  source 1..19: mol_type = other RNA
aatttctattggatgaagt

SEQ ID NO: 8114 - RNA, 19 nt, synthetic construct
  source 1..19: mol_type = other RNA
caatttctattggatgaag

SEQ ID NO: 8115 - RNA, 19 nt, synthetic construct
  source 1..19: mol_type = other RNA
gcaatttctattggatgaa

SEQ ID NO: 8116 - RNA, 19 nt, synthetic construct
  source 1..19: mol_type = other RNA
tgcaatttctattggatga

SEQ ID NO: 8117 - RNA, 19 nt, synthetic construct
  source 1..19: mol_type = other RNA
gtgcaatttctattggatg

SEQ ID NO: 8118 - RNA, 19 nt, synthetic construct
  source 1..19: mol_type = other RNA
cgtgcaatttctattggat

SEQ ID NO: 8119 - RNA, 19 nt, synthetic construct
  source 1..19: mol_type = other RNA
acgtgcaatttctattgga

SEQ ID NO: 8120 - RNA, 19 nt, synthetic construct
  source 1..19: mol_type = other RNA
gacgtgcaatttctattgg

SEQ ID NO: 8121 - RNA, 19 nt, synthetic construct
  source 1..19: mol_type = other RNA
tgacgtgcaatttctattg

SEQ ID NO: 8122 - RNA, 19 nt, synthetic construct
  source 1..19: mol_type = other RNA
ctgacgtgcaatttctatt

SEQ ID NO: 8123 - RNA, 19 nt, synthetic construct
  source 1..19: mol_type = other RNA
gctgacgtgcaatttctat

SEQ ID NO: 8124 - RNA, 19 nt, synthetic construct
  source 1..19: mol_type = other RNA
agctgacgtgcaatttcta

SEQ ID NO: 8125 - RNA, 19 nt, synthetic construct
  source 1..19: mol_type = other RNA
cagctgacgtgcaatttct

SEQ ID NO: 8126 - RNA, 19 nt, synthetic construct
  source 1..19: mol_type = other RNA
tcagctgacgtgcaatttc

SEQ ID NO: 8127 - RNA, 19 nt, synthetic construct
  source 1..19: mol_type = other RNA
gtcagctgacgtgcaattt

SEQ ID NO: 8128 - RNA, 19 nt, synthetic construct
  source 1..19: mol_type = other RNA
tgtcagctgacgtgcaatt

SEQ ID NO: 8129 - RNA, 19 nt, synthetic construct
  source 1..19: mol_type = other RNA
gtgtcagctgacgtgcaat

SEQ ID NO: 8130 - RNA, 19 nt, synthetic construct
  source 1..19: mol_type = other RNA
agtgtcagctgacgtgcaa

SEQ ID NO: 8131 - RNA, 19 nt, synthetic construct
  source 1..19: mol_type = other RNA
aagtgtcagctgacgtgca

SEQ ID NO: 8132 - RNA, 19 nt, synthetic construct
  source 1..19: mol_type = other RNA
aaagtgtcagctgacgtgc

SEQ ID NO: 8133 - RNA, 19 nt, synthetic construct
  source 1..19: mol_type = other RNA
aaaagtgtcagctgacgtg

SEQ ID NO: 8134 - RNA, 19 nt, synthetic construct
  source 1..19: mol_type = other RNA
caaaagtgtcagctgacgt

SEQ ID NO: 8135 - RNA, 19 nt, synthetic construct
  source 1..19: mol_type = other RNA
ccaaaagtgtcagctgacg

SEQ ID NO: 8136 - RNA, 19 nt, synthetic construct
  source 1..19: mol_type = other RNA
tccaaaagtgtcagctgac

SEQ ID NO: 8137 - RNA, 19 nt, synthetic construct
  source 1..19: mol_type = other RNA
ctccaaaagtgtcagctga

SEQ ID NO: 8138 - RNA, 19 nt, synthetic construct
  source 1..19: mol_type = other RNA
actccaaaagtgtcagctg

SEQ ID NO: 8139 - RNA, 19 nt, synthetic construct
  source 1..19: mol_type = other RNA
gactccaaaagtgtcagct

SEQ ID NO: 8140 - RNA, 19 nt, synthetic construct
  source 1..19: mol_type = other RNA
agactccaaaagtgtcagc

SEQ ID NO: 8141 - RNA, 19 nt, synthetic construct
  source 1..19: mol_type = other RNA
cagactccaaaagtgtcag

SEQ ID NO: 8142 - RNA, 19 nt, synthetic construct
  source 1..19: mol_type = other RNA
tcagactccaaaagtgtca

SEQ ID NO: 8143 - RNA, 19 nt, synthetic construct
  source 1..19: mol_type = other RNA
atcagactccaaaagtgtc

SEQ ID NO: 8144 - RNA, 19 nt, synthetic construct
  source 1..19: mol_type = other RNA
gatcagactccaaaagtgt

SEQ ID NO: 8145 - RNA, 19 nt, synthetic construct
  source 1..19: mol_type = other RNA
agatcagactccaaaagtg

SEQ ID NO: 8146 - RNA, 19 nt, synthetic construct
  source 1..19: mol_type = other RNA
aagatcagactccaaaagt

SEQ ID NO: 8147 - RNA, 19 nt, synthetic construct
  source 1..19: mol_type = other RNA
aaagatcagactccaaaag

SEQ ID NO: 8148 - RNA, 19 nt, synthetic construct
  source 1..19: mol_type = other RNA
taaagatcagactccaaaa

SEQ ID NO: 8149 - RNA, 19 nt, synthetic construct
  source 1..19: mol_type = other RNA
gtaaagatcagactccaaa

SEQ ID NO: 8150 - RNA, 19 nt, synthetic construct
  source 1..19: mol_type = other RNA
tgtaaagatcagactccaa

SEQ ID NO: 8151 - RNA, 19 nt, synthetic construct
  source 1..19: mol_type = other RNA
ctgtaaagatcagactcca

SEQ ID NO: 8152 - RNA, 19 nt, synthetic construct
  source 1..19: mol_type = other RNA
cctgtaaagatcagactcc

SEQ ID NO: 8153 - RNA, 19 nt, synthetic construct
  source 1..19: mol_type = other RNA
tcctgtaaagatcagactc

SEQ ID NO: 8154 - RNA, 19 nt, synthetic construct
  source 1..19: mol_type = other RNA
ttcctgtaaagatcagact

SEQ ID NO: 8155 - RNA, 19 nt, synthetic construct
  source 1..19: mol_type = other RNA
tttcctgtaaagatcagac

SEQ ID NO: 8156 - RNA, 19 nt, synthetic construct
  source 1..19: mol_type = other RNA
ctttcctgtaaagatcaga

SEQ ID NO: 8157 - RNA, 19 nt, synthetic construct
  source 1..19: mol_type = other RNA
actttcctgtaaagatcag

SEQ ID NO: 8158 - RNA, 19 nt, synthetic construct
  source 1..19: mol_type = other RNA
aactttcctgtaaagatca

SEQ ID NO: 8159 - RNA, 19 nt, synthetic construct
  source 1..19: mol_type = other RNA
gaactttcctgtaaagatc

SEQ ID NO: 8160 - RNA, 19 nt, synthetic construct
  source 1..19: mol_type = other RNA
tgaactttcctgtaaagat

SEQ ID NO: 8161 - RNA, 19 nt, synthetic construct
  source 1..19: mol_type = other RNA
ttgaactttcctgtaaaga

SEQ ID NO: 8162 - RNA, 19 nt, synthetic construct
  source 1..19: mol_type = other RNA
gttgaactttcctgtaaag

SEQ ID NO: 8163 - RNA, 19 nt, synthetic construct
  source 1..19: mol_type = other RNA
ggttgaactttcctgtaaa

SEQ ID NO: 8164 - RNA, 19 nt, synthetic construct
  source 1..19: mol_type = other RNA
cggttgaactttcctgtaa

SEQ ID NO: 8165 - RNA, 19 nt, synthetic construct
  source 1..19: mol_type = other RNA
acggttgaactttcctgta

SEQ ID NO: 8166 - RNA, 19 nt, synthetic construct
  source 1..19: mol_type = other RNA
gacggttgaactttcctgt

SEQ ID NO: 8167 - RNA, 19 nt, synthetic construct
  source 1..19: mol_type = other RNA
agacggttgaactttcctg

SEQ ID NO: 8168 - RNA, 19 nt, synthetic construct
  source 1..19: mol_type = other RNA
cagacggttgaactttcct

SEQ ID NO: 8169 - RNA, 19 nt, synthetic construct
  source 1..19: mol_type = other RNA
tcagacggttgaactttcc

SEQ ID NO: 8170 - RNA, 19 nt, synthetic construct
  source 1..19: mol_type = other RNA
ttcagacggttgaactttc

SEQ ID NO: 8171 - RNA, 19 nt, synthetic construct
  source 1..19: mol_type = other RNA
gttcagacggttgaacttt

SEQ ID NO: 8172 - RNA, 19 nt, synthetic construct
  source 1..19: mol_type = other RNA
agttcagacggttgaactt

SEQ ID NO: 8173 - RNA, 19 nt, synthetic construct
  source 1..19: mol_type = other RNA
aagttcagacggttgaact

SEQ ID NO: 8174 - RNA, 19 nt, synthetic construct
  source 1..19: mol_type = other RNA
caagttcagacggttgaac

SEQ ID NO: 8175 - RNA, 19 nt, synthetic construct
  source 1..19: mol_type = other RNA
acaagttcagacggttgaa

SEQ ID NO: 8176 - RNA, 19 nt, synthetic construct
  source 1..19: mol_type = other RNA
tacaagttcagacggttga

SEQ ID NO: 8177 - RNA, 19 nt, synthetic construct
  source 1..19: mol_type = other RNA
ctacaagttcagacggttg

SEQ ID NO: 8178 - RNA, 19 nt, synthetic construct
  source 1..19: mol_type = other RNA
cctacaagttcagacggtt

SEQ ID NO: 8179 - RNA, 19 nt, synthetic construct
  source 1..19: mol_type = other RNA
ccctacaagttcagacggt

SEQ ID NO: 8180 - RNA, 19 nt, synthetic construct
  source 1..19: mol_type = other RNA
tccctacaagttcagacgg

SEQ ID NO: 8181 - RNA, 19 nt, synthetic construct
  source 1..19: mol_type = other RNA
ctccctacaagttcagacg

SEQ ID NO: 8182 - RNA, 19 nt, synthetic construct
  source 1..19: mol_type = other RNA
actccctacaagttcagac

SEQ ID NO: 8183 - RNA, 19 nt, synthetic construct
  source 1..19: mol_type = other RNA
cactccctacaagttcaga

SEQ ID NO: 8184 - RNA, 19 nt, synthetic construct
  source 1..19: mol_type = other RNA
acactccctacaagttcag

SEQ ID NO: 8185 - RNA, 19 nt, synthetic construct
  source 1..19: mol_type = other RNA
cacactccctacaagttca

SEQ ID NO: 8186 - RNA, 19 nt, synthetic construct
  source 1..19: mol_type = other RNA
acacactccctacaagttc

SEQ ID NO: 8187 - RNA, 19 nt, synthetic construct
  source 1..19: mol_type = other RNA
cacacactccctacaagtt

SEQ ID NO: 8188 - RNA, 19 nt, synthetic construct
  source 1..19: mol_type = other RNA
ccacacactccctacaagt

SEQ ID NO: 8189 - RNA, 19 nt, synthetic construct
  source 1..19: mol_type = other RNA
tccacacactccctacaag

SEQ ID NO: 8190 - RNA, 19 nt, synthetic construct
  source 1..19: mol_type = other RNA
gtccacacactccctacaa

SEQ ID NO: 8191 - RNA, 19 nt, synthetic construct
  source 1..19: mol_type = other RNA
ggtccacacactccctaca

SEQ ID NO: 8192 - RNA, 19 nt, synthetic construct
  source 1..19: mol_type = other RNA
tggtccacacactccctac

SEQ ID NO: 8193 - RNA, 19 nt, synthetic construct
  source 1..19: mol_type = other RNA
ttggtccacacactcccta

SEQ ID NO: 8194 - RNA, 19 nt, synthetic construct
  source 1..19: mol_type = other RNA
tttggtccacacactccct

SEQ ID NO: 8195 - RNA, 19 nt, synthetic construct
  source 1..19: mol_type = other RNA
ctttggtccacacactccc

SEQ ID NO: 8196 - RNA, 19 nt, synthetic construct
  source 1..19: mol_type = other RNA
tctttggtccacacactcc

SEQ ID NO: 8197 - RNA, 19 nt, synthetic construct
  source 1..19: mol_type = other RNA
ttctttggtccacacactc

SEQ ID NO: 8198 - RNA, 19 nt, synthetic construct
  source 1..19: mol_type = other RNA
cttctttggtccacacact

SEQ ID NO: 8199 - RNA, 19 nt, synthetic construct
  source 1..19: mol_type = other RNA
tcttctttggtccacacac

SEQ ID NO: 8200 - RNA, 19 nt, synthetic construct
  source 1..19: mol_type = other RNA
atcttctttggtccacaca

SEQ ID NO: 8201 - RNA, 19 nt, synthetic construct
  source 1..19: mol_type = other RNA
tatcttctttggtccacac

SEQ ID NO: 8202 - RNA, 19 nt, synthetic construct
  source 1..19: mol_type = other RNA
ttatcttctttggtccaca

SEQ ID NO: 8203 - RNA, 19 nt, synthetic construct
  source 1..19: mol_type = other RNA
tttatcttctttggtccac

SEQ ID NO: 8204 - RNA, 19 nt, synthetic construct
  source 1..19: mol_type = other RNA
ctttatcttctttggtcca

SEQ ID NO: 8205 - RNA, 19 nt, synthetic construct
  source 1..19: mol_type = other RNA
tctttatcttctttggtcc

SEQ ID NO: 8206 - RNA, 19 nt, synthetic construct
  source 1..19: mol_type = other RNA
ttctttatcttctttggtc

SEQ ID NO: 8207 - RNA, 19 nt, synthetic construct
  source 1..19: mol_type = other RNA
tttctttatcttctttggt

SEQ ID NO: 8208 - RNA, 19 nt, synthetic construct
  source 1..19: mol_type = other RNA
atttctttatcttctttgg

SEQ ID NO: 8209 - RNA, 19 nt, synthetic construct
  source 1..19: mol_type = other RNA
tatttctttatcttctttg

SEQ ID NO: 8210 - RNA, 19 nt, synthetic construct
  source 1..19: mol_type = other RNA
ttatttctttatcttcttt

SEQ ID NO: 8211 - RNA, 19 nt, synthetic construct
  source 1..19: mol_type = other RNA
tttatttctttatcttctt

SEQ ID NO: 8212 - RNA, 19 nt, synthetic construct
  source 1..19: mol_type = other RNA
atttatttctttatcttct

SEQ ID NO: 8213 - RNA, 19 nt, synthetic construct
  source 1..19: mol_type = other RNA
aatttatttctttatcttc

SEQ ID NO: 8214 - RNA, 19 nt, synthetic construct
  source 1..19: mol_type = other RNA
gaatttatttctttatctt

SEQ ID NO: 8215 - RNA, 19 nt, synthetic construct
  source 1..19: mol_type = other RNA
agaatttatttctttatct

SEQ ID NO: 8216 - RNA, 19 nt, synthetic construct
  source 1..19: mol_type = other RNA
gagaatttatttctttatc

SEQ ID NO: 8217 - RNA, 19 nt, synthetic construct
  source 1..19: mol_type = other RNA
ggagaatttatttctttat

SEQ ID NO: 8218 - RNA, 19 nt, synthetic construct
  source 1..19: mol_type = other RNA
tggagaatttatttcttta

SEQ ID NO: 8219 - RNA, 19 nt, synthetic construct
  source 1..19: mol_type = other RNA
ttggagaatttatttcttt

SEQ ID NO: 8220 - RNA, 19 nt, synthetic construct
  source 1..19: mol_type = other RNA
tttggagaatttatttctt

SEQ ID NO: 8221 - RNA, 19 nt, synthetic construct
  source 1..19: mol_type = other RNA
atttggagaatttatttct

SEQ ID NO: 8222 - RNA, 19 nt, synthetic construct
  source 1..19: mol_type = other RNA
aatttggagaatttatttc

SEQ ID NO: 8223 - RNA, 19 nt, synthetic construct
  source 1..19: mol_type = other RNA
aaatttggagaatttattt

SEQ ID NO: 8224 - RNA, 19 nt, synthetic construct
  source 1..19: mol_type = other RNA
taaatttggagaatttatt

SEQ ID NO: 8225 - RNA, 19 nt, synthetic construct
  source 1..19: mol_type = other RNA
ataaatttggagaatttat

SEQ ID NO: 8226 - RNA, 19 nt, synthetic construct
  source 1..19: mol_type = other RNA
aataaatttggagaattta

SEQ ID NO: 8227 - RNA, 19 nt, synthetic construct
  source 1..19: mol_type = other RNA
taataaatttggagaattt

SEQ ID NO: 8228 - RNA, 19 nt, synthetic construct
  source 1..19: mol_type = other RNA
ttaataaatttggagaatt

SEQ ID NO: 8229 - RNA, 19 nt, synthetic construct
  source 1..19: mol_type = other RNA
tttaataaatttggagaat

SEQ ID NO: 8230 - RNA, 19 nt, synthetic construct
  source 1..19: mol_type = other RNA
ttttaataaatttggagaa

SEQ ID NO: 8231 - RNA, 19 nt, synthetic construct
  source 1..19: mol_type = other RNA
tttttaataaatttggaga

SEQ ID NO: 8232 - RNA, 19 nt, synthetic construct
  source 1..19: mol_type = other RNA
atttttaataaatttggag

SEQ ID NO: 8233 - RNA, 19 nt, synthetic construct
  source 1..19: mol_type = other RNA
catttttaataaatttgga

SEQ ID NO: 8234 - RNA, 19 nt, synthetic construct
  source 1..19: mol_type = other RNA
tcatttttaataaatttgg

SEQ ID NO: 8235 - RNA, 19 nt, synthetic construct
  source 1..19: mol_type = other RNA
atcatttttaataaatttg

SEQ ID NO: 8236 - RNA, 19 nt, synthetic construct
  source 1..19: mol_type = other RNA
aatcatttttaataaattt

SEQ ID NO: 8237 - RNA, 19 nt, synthetic construct
  source 1..19: mol_type = other RNA
gaatcatttttaataaatt

SEQ ID NO: 8238 - RNA, 19 nt, synthetic construct
  source 1..19: mol_type = other RNA
cgaatcatttttaataaat

SEQ ID NO: 8239 - RNA, 19 nt, synthetic construct
  source 1..19: mol_type = other RNA
gcgaatcatttttaataaa

SEQ ID NO: 8240 - RNA, 19 nt, synthetic construct
  source 1..19: mol_type = other RNA
ggcgaatcatttttaataa

SEQ ID NO: 8241 - RNA, 19 nt, synthetic construct
  source 1..19: mol_type = other RNA
tggcgaatcatttttaata

SEQ ID NO: 8242 - RNA, 19 nt, synthetic construct
  source 1..19: mol_type = other RNA
atggcgaatcatttttaat

SEQ ID NO: 8243 - RNA, 19 nt, synthetic construct
  source 1..19: mol_type = other RNA
tatggcgaatcatttttaa

SEQ ID NO: 8244 - RNA, 19 nt, synthetic construct
  source 1..19: mol_type = other RNA
gtatggcgaatcattttta

SEQ ID NO: 8245 - RNA, 19 nt, synthetic construct
  source 1..19: mol_type = other RNA
ggtatggcgaatcattttt

SEQ ID NO: 8246 - RNA, 19 nt, synthetic construct
  source 1..19: mol_type = other RNA
tggtatggcgaatcatttt

SEQ ID NO: 8247 - RNA, 19 nt, synthetic construct
  source 1..19: mol_type = other RNA
gtggtatggcgaatcattt

SEQ ID NO: 8248 - RNA, 19 nt, synthetic construct
  source 1..19: mol_type = other RNA
tgtggtatggcgaatcatt

SEQ ID NO: 8249 - RNA, 19 nt, synthetic construct
  source 1..19: mol_type = other RNA
ttgtggtatggcgaatcat

SEQ ID NO: 8250 - RNA, 19 nt, synthetic construct
  source 1..19: mol_type = other RNA
tttgtggtatggcgaatca

SEQ ID NO: 8251 - RNA, 19 nt, synthetic construct
  source 1..19: mol_type = other RNA
atttgtggtatggcgaatc

SEQ ID NO: 8252 - RNA, 19 nt, synthetic construct
  source 1..19: mol_type = other RNA
gatttgtggtatggcgaat

SEQ ID NO: 8253 - RNA, 19 nt, synthetic construct
  source 1..19: mol_type = other RNA
agatttgtggtatggcgaa

SEQ ID NO: 8254 - RNA, 19 nt, synthetic construct
  source 1..19: mol_type = other RNA
gagatttgtggtatggcga

SEQ ID NO: 8255 - RNA, 19 nt, synthetic construct
  source 1..19: mol_type = other RNA
tgagatttgtggtatggcg

SEQ ID NO: 8256 - RNA, 19 nt, synthetic construct
  source 1..19: mol_type = other RNA
gtgagatttgtggtatggc

SEQ ID NO: 8257 - RNA, 19 nt, synthetic construct
  source 1..19: mol_type = other RNA
ggtgagatttgtggtatgg

SEQ ID NO: 8258 - RNA, 19 nt, synthetic construct
  source 1..19: mol_type = other RNA
gggtgagatttgtggtatg

SEQ ID NO: 8259 - RNA, 19 nt, synthetic construct
  source 1..19: mol_type = other RNA
agggtgagatttgtggtat

SEQ ID NO: 8260 - RNA, 19 nt, synthetic construct
  source 1..19: mol_type = other RNA
gagggtgagatttgtggta

SEQ ID NO: 8261 - RNA, 19 nt, synthetic construct
  source 1..19: mol_type = other RNA
agagggtgagatttgtggt

SEQ ID NO: 8262 - RNA, 19 nt, synthetic construct
  source 1..19: mol_type = other RNA
cagagggtgagatttgtgg

SEQ ID NO: 8263 - RNA, 19 nt, synthetic construct
  source 1..19: mol_type = other RNA
ccagagggtgagatttgtg

SEQ ID NO: 8264 - RNA, 19 nt, synthetic construct
  source 1..19: mol_type = other RNA
accagagggtgagatttgt

SEQ ID NO: 8265 - RNA, 19 nt, synthetic construct
  source 1..19: mol_type = other RNA
aaccagagggtgagatttg

SEQ ID NO: 8266 - RNA, 19 nt, synthetic construct
  source 1..19: mol_type = other RNA
aaaccagagggtgagattt

SEQ ID NO: 8267 - RNA, 19 nt, synthetic construct
  source 1..19: mol_type = other RNA
caaaccagagggtgagatt

SEQ ID NO: 8268 - RNA, 19 nt, synthetic construct
  source 1..19: mol_type = other RNA
tcaaaccagagggtgagat

SEQ ID NO: 8269 - RNA, 19 nt, synthetic construct
  source 1..19: mol_type = other RNA
ttcaaaccagagggtgaga

SEQ ID NO: 8270 - RNA, 19 nt, synthetic construct
  source 1..19: mol_type = other RNA
tttcaaaccagagggtgag

SEQ ID NO: 8271 - RNA, 19 nt, synthetic construct
  source 1..19: mol_type = other RNA
ttttcaaaccagagggtga

SEQ ID NO: 8272 - RNA, 19 nt, synthetic construct
  source 1..19: mol_type = other RNA
tttttcaaaccagagggtg

SEQ ID NO: 8273 - RNA, 19 nt, synthetic construct
  source 1..19: mol_type = other RNA
atttttcaaaccagagggt

SEQ ID NO: 8274 - RNA, 19 nt, synthetic construct
  source 1..19: mol_type = other RNA
catttttcaaaccagaggg

SEQ ID NO: 8275 - RNA, 19 nt, synthetic construct
  source 1..19: mol_type = other RNA
gcatttttcaaaccagagg

SEQ ID NO: 8276 - RNA, 19 nt, synthetic construct
  source 1..19: mol_type = other RNA
tgcatttttcaaaccagag

SEQ ID NO: 8277 - RNA, 19 nt, synthetic construct
  source 1..19: mol_type = other RNA
atgcatttttcaaaccaga

SEQ ID NO: 8278 - RNA, 19 nt, synthetic construct
  source 1..19: mol_type = other RNA
aatgcatttttcaaaccag

SEQ ID NO: 8279 - RNA, 19 nt, synthetic construct
  source 1..19: mol_type = other RNA
caatgcatttttcaaacca

SEQ ID NO: 8280 - RNA, 19 nt, synthetic construct
  source 1..19: mol_type = other RNA
acaatgcatttttcaaacc

SEQ ID NO: 8281 - RNA, 19 nt, synthetic construct
  source 1..19: mol_type = other RNA
cacaatgcatttttcaaac

SEQ ID NO: 8282 - RNA, 19 nt, synthetic construct
  source 1..19: mol_type = other RNA
ccacaatgcatttttcaaa

SEQ ID NO: 8283 - RNA, 19 nt, synthetic construct
  source 1..19: mol_type = other RNA
tccacaatgcatttttcaa

SEQ ID NO: 8284 - RNA, 19 nt, synthetic construct
  source 1..19: mol_type = other RNA
ttccacaatgcatttttca

SEQ ID NO: 8285 - RNA, 19 nt, synthetic construct
  source 1..19: mol_type = other RNA
cttccacaatgcatttttc

SEQ ID NO: 8286 - RNA, 19 nt, synthetic construct
  source 1..19: mol_type = other RNA
gcttccacaatgcattttt

SEQ ID NO: 8287 - RNA, 19 nt, synthetic construct
  source 1..19: mol_type = other RNA
tgcttccacaatgcatttt

SEQ ID NO: 8288 - RNA, 19 nt, synthetic construct
  source 1..19: mol_type = other RNA
ctgcttccacaatgcattt

SEQ ID NO: 8289 - RNA, 19 nt, synthetic construct
  source 1..19: mol_type = other RNA
tctgcttccacaatgcatt

SEQ ID NO: 8290 - RNA, 19 nt, synthetic construct
  source 1..19: mol_type = other RNA
ttctgcttccacaatgcat

SEQ ID NO: 8291 - RNA, 19 nt, synthetic construct
  source 1..19: mol_type = other RNA
tttctgcttccacaatgca

SEQ ID NO: 8292 - RNA, 19 nt, synthetic construct
  source 1..19: mol_type = other RNA
ttttctgcttccacaatgc

SEQ ID NO: 8293 - RNA, 19 nt, synthetic construct
  source 1..19: mol_type = other RNA
attttctgcttccacaatg

SEQ ID NO: 8294 - RNA, 19 nt, synthetic construct
  source 1..19: mol_type = other RNA
aattttctgcttccacaat

SEQ ID NO: 8295 - RNA, 19 nt, synthetic construct
  source 1..19: mol_type = other RNA
aaattttctgcttccacaa

SEQ ID NO: 8296 - RNA, 19 nt, synthetic construct
  source 1..19: mol_type = other RNA
aaaattttctgcttccaca

SEQ ID NO: 8297 - RNA, 19 nt, synthetic construct
  source 1..19: mol_type = other RNA
caaaattttctgcttccac

SEQ ID NO: 8298 - RNA, 19 nt, synthetic construct
  source 1..19: mol_type = other RNA
tcaaaattttctgcttcca

SEQ ID NO: 8299 - RNA, 19 nt, synthetic construct
  source 1..19: mol_type = other RNA
ttcaaaattttctgcttcc

SEQ ID NO: 8300 - RNA, 19 nt, synthetic construct
  source 1..19: mol_type = other RNA
cttcaaaattttctgcttc

SEQ ID NO: 8301 - RNA, 19 nt, synthetic construct
  source 1..19: mol_type = other RNA
tcttcaaaattttctgctt

SEQ ID NO: 8302 - RNA, 19 nt, synthetic construct
  source 1..19: mol_type = other RNA
ttcttcaaaattttctgct

SEQ ID NO: 8303 - RNA, 19 nt, synthetic construct
  source 1..19: mol_type = other RNA
gttcttcaaaattttctgc

SEQ ID NO: 8304 - RNA, 19 nt, synthetic construct
  source 1..19: mol_type = other RNA
cgttcttcaaaattttctg

SEQ ID NO: 8305 - RNA, 19 nt, synthetic construct
  source 1..19: mol_type = other RNA
ccgttcttcaaaattttct

SEQ ID NO: 8306 - RNA, 19 nt, synthetic construct
  source 1..19: mol_type = other RNA
cccgttcttcaaaattttc

SEQ ID NO: 8307 - RNA, 19 nt, synthetic construct
  source 1..19: mol_type = other RNA
acccgttcttcaaaatttt

SEQ ID NO: 8308 - RNA, 19 nt, synthetic construct
  source 1..19: mol_type = other RNA
cacccgttcttcaaaattt

SEQ ID NO: 8309 - RNA, 19 nt, synthetic construct
  source 1..19: mol_type = other RNA
ccacccgttcttcaaaatt

SEQ ID NO: 8310 - RNA, 19 nt, synthetic construct
  source 1..19: mol_type = other RNA
gccacccgttcttcaaaat

SEQ ID NO: 8311 - RNA, 19 nt, synthetic construct
  source 1..19: mol_type = other RNA
tgccacccgttcttcaaaa

SEQ ID NO: 8312 - RNA, 19 nt, synthetic construct
  source 1..19: mol_type = other RNA
ctgccacccgttcttcaaa

SEQ ID NO: 8313 - RNA, 19 nt, synthetic construct
  source 1..19: mol_type = other RNA
actgccacccgttcttcaa

SEQ ID NO: 8314 - RNA, 19 nt, synthetic construct
  source 1..19: mol_type = other RNA
tactgccacccgttcttca

SEQ ID NO: 8315 - RNA, 19 nt, synthetic construct
  source 1..19: mol_type = other RNA
gtactgccacccgttcttc

SEQ ID NO: 8316 - RNA, 19 nt, synthetic construct
  source 1..19: mol_type = other RNA
agtactgccacccgttctt

SEQ ID NO: 8317 - RNA, 19 nt, synthetic construct
  source 1..19: mol_type = other RNA
tagtactgccacccgttct

SEQ ID NO: 8318 - RNA, 19 nt, synthetic construct
  source 1..19: mol_type = other RNA
ttagtactgccacccgttc

SEQ ID NO: 8319 - RNA, 19 nt, synthetic construct
  source 1..19: mol_type = other RNA
cttagtactgccacccgtt

SEQ ID NO: 8320 - RNA, 19 nt, synthetic construct
  source 1..19: mol_type = other RNA
acttagtactgccacccgt

SEQ ID NO: 8321 - RNA, 19 nt, synthetic construct
  source 1..19: mol_type = other RNA
tacttagtactgccacccg

SEQ ID NO: 8322 - RNA, 19 nt, synthetic construct
  source 1..19: mol_type = other RNA
ctacttagtactgccaccc

SEQ ID NO: 8323 - RNA, 19 nt, synthetic construct
  source 1..19: mol_type = other RNA
tctacttagtactgccacc

SEQ ID NO: 8324 - RNA, 19 nt, synthetic construct
  source 1..19: mol_type = other RNA
ttctacttagtactgccac

SEQ ID NO: 8325 - RNA, 19 nt, synthetic construct
  source 1..19: mol_type = other RNA
attctacttagtactgcca

SEQ ID NO: 8326 - RNA, 19 nt, synthetic construct
  source 1..19: mol_type = other RNA
aattctacttagtactgcc

SEQ ID NO: 8327 - RNA, 19 nt, synthetic construct
  source 1..19: mol_type = other RNA
taattctacttagtactgc

SEQ ID NO: 8328 - RNA, 19 nt, synthetic construct
  source 1..19: mol_type = other RNA
ataattctacttagtactg

SEQ ID NO: 8329 - RNA, 19 nt, synthetic construct
  source 1..19: mol_type = other RNA
tataattctacttagtact

SEQ ID NO: 8330 - RNA, 19 nt, synthetic construct
  source 1..19: mol_type = other RNA
ctataattctacttagtac

SEQ ID NO: 8331 - RNA, 19 nt, synthetic construct
  source 1..19: mol_type = other RNA
tctataattctacttagta

SEQ ID NO: 8332 - RNA, 19 nt, synthetic construct
  source 1..19: mol_type = other RNA
ttctataattctacttagt

SEQ ID NO: 8333 - RNA, 19 nt, synthetic construct
  source 1..19: mol_type = other RNA
tttctataattctacttag

SEQ ID NO: 8334 - RNA, 19 nt, synthetic construct
  source 1..19: mol_type = other RNA
atttctataattctactta

SEQ ID NO: 8335 - RNA, 19 nt, synthetic construct
  source 1..19: mol_type = other RNA
aatttctataattctactt

SEQ ID NO: 8336 - RNA, 19 nt, synthetic construct
  source 1..19: mol_type = other RNA
gaatttctataattctact

SEQ ID NO: 8337 - RNA, 19 nt, synthetic construct
  source 1..19: mol_type = other RNA
agaatttctataattctac

SEQ ID NO: 8338 - RNA, 19 nt, synthetic construct
  source 1..19: mol_type = other RNA
cagaatttctataattcta

SEQ ID NO: 8339 - RNA, 19 nt, synthetic construct
  source 1..19: mol_type = other RNA
gcagaatttctataattct

SEQ ID NO: 8340 - RNA, 19 nt, synthetic construct
  source 1..19: mol_type = other RNA
tgcagaatttctataattc

SEQ ID NO: 8341 - RNA, 19 nt, synthetic construct
  source 1..19: mol_type = other RNA
ttgcagaatttctataatt

SEQ ID NO: 8342 - RNA, 19 nt, synthetic construct
  source 1..19: mol_type = other RNA
cttgcagaatttctataat

SEQ ID NO: 8343 - RNA, 19 nt, synthetic construct
  source 1..19: mol_type = other RNA
acttgcagaatttctataa

SEQ ID NO: 8344 - RNA, 19 nt, synthetic construct
  source 1..19: mol_type = other RNA
aacttgcagaatttctata

SEQ ID NO: 8345 - RNA, 19 nt, synthetic construct
  source 1..19: mol_type = other RNA
aaacttgcagaatttctat

SEQ ID NO: 8346 - RNA, 19 nt, synthetic construct
  source 1..19: mol_type = other RNA
aaaacttgcagaatttcta

SEQ ID NO: 8347 - RNA, 19 nt, synthetic construct
  source 1..19: mol_type = other RNA
aaaaacttgcagaatttct

SEQ ID NO: 8348 - RNA, 19 nt, synthetic construct
  source 1..19: mol_type = other RNA
gaaaaacttgcagaatttc

SEQ ID NO: 8349 - RNA, 19 nt, synthetic construct
  source 1..19: mol_type = other RNA
tgaaaaacttgcagaattt

SEQ ID NO: 8350 - RNA, 19 nt, synthetic construct
  source 1..19: mol_type = other RNA
ttgaaaaacttgcagaatt

SEQ ID NO: 8351 - RNA, 19 nt, synthetic construct
  source 1..19: mol_type = other RNA
cttgaaaaacttgcagaat

SEQ ID NO: 8352 - RNA, 19 nt, synthetic construct
  source 1..19: mol_type = other RNA
tcttgaaaaacttgcagaa

SEQ ID NO: 8353 - RNA, 19 nt, synthetic construct
  source 1..19: mol_type = other RNA
atcttgaaaaacttgcaga

SEQ ID NO: 8354 - RNA, 19 nt, synthetic construct
  source 1..19: mol_type = other RNA
aatcttgaaaaacttgcag

SEQ ID NO: 8355 - RNA, 19 nt, synthetic construct
  source 1..19: mol_type = other RNA
aaatcttgaaaaacttgca

SEQ ID NO: 8356 - RNA, 19 nt, synthetic construct
  source 1..19: mol_type = other RNA
caaatcttgaaaaacttgc

SEQ ID NO: 8357 - RNA, 19 nt, synthetic construct
  source 1..19: mol_type = other RNA
tcaaatcttgaaaaacttg

SEQ ID NO: 8358 - RNA, 19 nt, synthetic construct
  source 1..19: mol_type = other RNA
ttcaaatcttgaaaaactt

SEQ ID NO: 8359 - RNA, 19 nt, synthetic construct
  source 1..19: mol_type = other RNA
attcaaatcttgaaaaact

SEQ ID NO: 8360 - RNA, 19 nt, synthetic construct
  source 1..19: mol_type = other RNA
tattcaaatcttgaaaaac

SEQ ID NO: 8361 - RNA, 19 nt, synthetic construct
  source 1..19: mol_type = other RNA
ttattcaaatcttgaaaaa

SEQ ID NO: 8362 - RNA, 19 nt, synthetic construct
  source 1..19: mol_type = other RNA
attattcaaatcttgaaaa

SEQ ID NO: 8363 - RNA, 19 nt, synthetic construct
  source 1..19: mol_type = other RNA
aattattcaaatcttgaaa

SEQ ID NO: 8364 - RNA, 19 nt, synthetic construct
  source 1..19: mol_type = other RNA
aaattattcaaatcttgaa

SEQ ID NO: 8365 - RNA, 19 nt, synthetic construct
  source 1..19: mol_type = other RNA
gaaattattcaaatcttga

SEQ ID NO: 8366 - RNA, 19 nt, synthetic construct
  source 1..19: mol_type = other RNA
tgaaattattcaaatcttg

SEQ ID NO: 8367 - RNA, 19 nt, synthetic construct
  source 1..19: mol_type = other RNA
ttgaaattattcaaatctt

SEQ ID NO: 8368 - RNA, 19 nt, synthetic construct
  source 1..19: mol_type = other RNA
attgaaattattcaaatct

SEQ ID NO: 8369 - RNA, 19 nt, synthetic construct
  source 1..19: mol_type = other RNA
cattgaaattattcaaatc

SEQ ID NO: 8370 - RNA, 19 nt, synthetic construct
  source 1..19: mol_type = other RNA
ccattgaaattattcaaat

SEQ ID NO: 8371 - RNA, 19 nt, synthetic construct
  source 1..19: mol_type = other RNA
gccattgaaattattcaaa

SEQ ID NO: 8372 - RNA, 19 nt, synthetic construct
  source 1..19: mol_type = other RNA
cgccattgaaattattcaa

SEQ ID NO: 8373 - RNA, 19 nt, synthetic construct
  source 1..19: mol_type = other RNA
acgccattgaaattattca

SEQ ID NO: 8374 - RNA, 19 nt, synthetic construct
  source 1..19: mol_type = other RNA
tacgccattgaaattattc

SEQ ID NO: 8375 - RNA, 19 nt, synthetic construct
  source 1..19: mol_type = other RNA
atacgccattgaaattatt

SEQ ID NO: 8376 - RNA, 19 nt, synthetic construct
  source 1..19: mol_type = other RNA
aatacgccattgaaattat

SEQ ID NO: 8377 - RNA, 19 nt, synthetic construct
  source 1..19: mol_type = other RNA
caatacgccattgaaatta

SEQ ID NO: 8378 - RNA, 19 nt, synthetic construct
  source 1..19: mol_type = other RNA
ccaatacgccattgaaatt

SEQ ID NO: 8379 - RNA, 19 nt, synthetic construct
  source 1..19: mol_type = other RNA
tccaatacgccattgaaat

SEQ ID NO: 8380 - RNA, 19 nt, synthetic construct
  source 1..19: mol_type = other RNA
ctccaatacgccattgaaa

SEQ ID NO: 8381 - RNA, 19 nt, synthetic construct
  source 1..19: mol_type = other RNA
tctccaatacgccattgaa

SEQ ID NO: 8382 - RNA, 19 nt, synthetic construct
  source 1..19: mol_type = other RNA
atctccaatacgccattga

SEQ ID NO: 8383 - RNA, 19 nt, synthetic construct
  source 1..19: mol_type = other RNA
tatctccaatacgccattg

SEQ ID NO: 8384 - RNA, 19 nt, synthetic construct
  source 1..19: mol_type = other RNA
ctatctccaatacgccatt

SEQ ID NO: 8385 - RNA, 19 nt, synthetic construct
  source 1..19: mol_type = other RNA
actatctccaatacgccat

SEQ ID NO: 8386 - RNA, 19 nt, synthetic construct
  source 1..19: mol_type = other RNA
gactatctccaatacgcca

SEQ ID NO: 8387 - RNA, 19 nt, synthetic construct
  source 1..19: mol_type = other RNA
tgactatctccaatacgcc

SEQ ID NO: 8388 - RNA, 19 nt, synthetic construct
  source 1..19: mol_type = other RNA
ctgactatctccaatacgc

SEQ ID NO: 8389 - RNA, 19 nt, synthetic construct
  source 1..19: mol_type = other RNA
actgactatctccaatacg

SEQ ID NO: 8390 - RNA, 19 nt, synthetic construct
  source 1..19: mol_type = other RNA
cactgactatctccaatac

SEQ ID NO: 8391 - RNA, 19 nt, synthetic construct
  source 1..19: mol_type = other RNA
gcactgactatctccaata

SEQ ID NO: 8392 - RNA, 19 nt, synthetic construct
  source 1..19: mol_type = other RNA
tgcactgactatctccaat

SEQ ID NO: 8393 - RNA, 19 nt, synthetic construct
  source 1..19: mol_type = other RNA
ctgcactgactatctccaa

SEQ ID NO: 8394 - RNA, 19 nt, synthetic construct
  source 1..19: mol_type = other RNA
actgcactgactatctcca

SEQ ID NO: 8395 - RNA, 19 nt, synthetic construct
  source 1..19: mol_type = other RNA
tactgcactgactatctcc

SEQ ID NO: 8396 - RNA, 19 nt, synthetic construct
  source 1..19: mol_type = other RNA
ttactgcactgactatctc

SEQ ID NO: 8397 - RNA, 19 nt, synthetic construct
  source 1..19: mol_type = other RNA
tttactgcactgactatct

SEQ ID NO: 8398 - RNA, 19 nt, synthetic construct
  source 1..19: mol_type = other RNA
atttactgcactgactatc

SEQ ID NO: 8399 - RNA, 19 nt, synthetic construct
  source 1..19: mol_type = other RNA
aatttactgcactgactat

SEQ ID NO: 8400 - RNA, 19 nt, synthetic construct
  source 1..19: mol_type = other RNA
gaatttactgcactgacta

SEQ ID NO: 8401 - RNA, 19 nt, synthetic construct
  source 1..19: mol_type = other RNA
tgaatttactgcactgact

SEQ ID NO: 8402 - RNA, 19 nt, synthetic construct
  source 1..19: mol_type = other RNA
ctgaatttactgcactgac

SEQ ID NO: 8403 - RNA, 19 nt, synthetic construct
  source 1..19: mol_type = other RNA
actgaatttactgcactga

SEQ ID NO: 8404 - RNA, 19 nt, synthetic construct
  source 1..19: mol_type = other RNA
cactgaatttactgcactg

SEQ ID NO: 8405 - RNA, 19 nt, synthetic construct
  source 1..19: mol_type = other RNA
acactgaatttactgcact

SEQ ID NO: 8406 - RNA, 19 nt, synthetic construct
  source 1..19: mol_type = other RNA
gacactgaatttactgcac

SEQ ID NO: 8407 - RNA, 19 nt, synthetic construct
  source 1..19: mol_type = other RNA
tgacactgaatttactgca

SEQ ID NO: 8408 - RNA, 19 nt, synthetic construct
  source 1..19: mol_type = other RNA
ctgacactgaatttactgc

SEQ ID NO: 8409 - RNA, 19 nt, synthetic construct
  source 1..19: mol_type = other RNA
actgacactgaatttactg

SEQ ID NO: 8410 - RNA, 19 nt, synthetic construct
  source 1..19: mol_type = other RNA
tactgacactgaatttact

SEQ ID NO: 8411 - RNA, 19 nt, synthetic construct
  source 1..19: mol_type = other RNA
atactgacactgaatttac

SEQ ID NO: 8412 - RNA, 19 nt, synthetic construct
  source 1..19: mol_type = other RNA
tatactgacactgaattta

SEQ ID NO: 8413 - RNA, 19 nt, synthetic construct
  source 1..19: mol_type = other RNA
gtatactgacactgaattt

SEQ ID NO: 8414 - RNA, 19 nt, synthetic construct
  source 1..19: mol_type = other RNA
tgtatactgacactgaatt

SEQ ID NO: 8415 - RNA, 19 nt, synthetic construct
  source 1..19: mol_type = other RNA
ctgtatactgacactgaat

SEQ ID NO: 8416 - RNA, 19 nt, synthetic construct
  source 1..19: mol_type = other RNA
tctgtatactgacactgaa

SEQ ID NO: 8417 - RNA, 19 nt, synthetic construct
  source 1..19: mol_type = other RNA
gtctgtatactgacactga

SEQ ID NO: 8418 - RNA, 19 nt, synthetic construct
  source 1..19: mol_type = other RNA
agtctgtatactgacactg

SEQ ID NO: 8419 - RNA, 19 nt, synthetic construct
  source 1..19: mol_type = other RNA
tagtctgtatactgacact

SEQ ID NO: 8420 - RNA, 19 nt, synthetic construct
  source 1..19: mol_type = other RNA
ctagtctgtatactgacac

SEQ ID NO: 8421 - RNA, 19 nt, synthetic construct
  source 1..19: mol_type = other RNA
tctagtctgtatactgaca

SEQ ID NO: 8422 - RNA, 19 nt, synthetic construct
  source 1..19: mol_type = other RNA
gtctagtctgtatactgac

SEQ ID NO: 8423 - RNA, 19 nt, synthetic construct
  source 1..19: mol_type = other RNA
ggtctagtctgtatactga

SEQ ID NO: 8424 - RNA, 19 nt, synthetic construct
  source 1..19: mol_type = other RNA
tggtctagtctgtatactg

SEQ ID NO: 8425 - RNA, 19 nt, synthetic construct
  source 1..19: mol_type = other RNA
atggtctagtctgtatact

SEQ ID NO: 8426 - RNA, 19 nt, synthetic construct
  source 1..19: mol_type = other RNA
tatggtctagtctgtatac

SEQ ID NO: 8427 - RNA, 19 nt, synthetic construct
  source 1..19: mol_type = other RNA
gtatggtctagtctgtata

SEQ ID NO: 8428 - RNA, 19 nt, synthetic construct
  source 1..19: mol_type = other RNA
ggtatggtctagtctgtat

SEQ ID NO: 8429 - RNA, 19 nt, synthetic construct
  source 1..19: mol_type = other RNA
aggtatggtctagtctgta

SEQ ID NO: 8430 - RNA, 19 nt, synthetic construct
  source 1..19: mol_type = other RNA
aaggtatggtctagtctgt

SEQ ID NO: 8431 - RNA, 19 nt, synthetic construct
  source 1..19: mol_type = other RNA
aaaggtatggtctagtctg

SEQ ID NO: 8432 - RNA, 19 nt, synthetic construct
  source 1..19: mol_type = other RNA
caaaggtatggtctagtct

SEQ ID NO: 8433 - RNA, 19 nt, synthetic construct
  source 1..19: mol_type = other RNA
tcaaaggtatggtctagtc

SEQ ID NO: 8434 - RNA, 19 nt, synthetic construct
  source 1..19: mol_type = other RNA
ctcaaaggtatggtctagt

SEQ ID NO: 8435 - RNA, 19 nt, synthetic construct
  source 1..19: mol_type = other RNA
cctcaaaggtatggtctag

SEQ ID NO: 8436 - RNA, 19 nt, synthetic construct
  source 1..19: mol_type = other RNA
gcctcaaaggtatggtcta

SEQ ID NO: 8437 - RNA, 19 nt, synthetic construct
  source 1..19: mol_type = other RNA
tgcctcaaaggtatggtct

SEQ ID NO: 8438 - RNA, 19 nt, synthetic construct
  source 1..19: mol_type = other RNA
gtgcctcaaaggtatggtc

SEQ ID NO: 8439 - RNA, 19 nt, synthetic construct
  source 1..19: mol_type = other RNA
agtgcctcaaaggtatggt

SEQ ID NO: 8440 - RNA, 19 nt, synthetic construct
  source 1..19: mol_type = other RNA
cagtgcctcaaaggtatgg

SEQ ID NO: 8441 - RNA, 19 nt, synthetic construct
  source 1..19: mol_type = other RNA
gcagtgcctcaaaggtatg

SEQ ID NO: 8442 - RNA, 19 nt, synthetic construct
  source 1..19: mol_type = other RNA
tgcagtgcctcaaaggtat

SEQ ID NO: 8443 - RNA, 19 nt, synthetic construct
  source 1..19: mol_type = other RNA
ctgcagtgcctcaaaggta

SEQ ID NO: 8444 - RNA, 19 nt, synthetic construct
  source 1..19: mol_type = other RNA
cctgcagtgcctcaaaggt

SEQ ID NO: 8445 - RNA, 19 nt, synthetic construct
  source 1..19: mol_type = other RNA
tcctgcagtgcctcaaagg

SEQ ID NO: 8446 - RNA, 19 nt, synthetic construct
  source 1..19: mol_type = other RNA
ttcctgcagtgcctcaaag

SEQ ID NO: 8447 - RNA, 19 nt, synthetic construct
  source 1..19: mol_type = other RNA
tttcctgcagtgcctcaaa

SEQ ID NO: 8448 - RNA, 19 nt, synthetic construct
  source 1..19: mol_type = other RNA
ctttcctgcagtgcctcaa

SEQ ID NO: 8449 - RNA, 19 nt, synthetic construct
  source 1..19: mol_type = other RNA
cctttcctgcagtgcctca

SEQ ID NO: 8450 - RNA, 19 nt, synthetic construct
  source 1..19: mol_type = other RNA
tcctttcctgcagtgcctc

SEQ ID NO: 8451 - RNA, 19 nt, synthetic construct
  source 1..19: mol_type = other RNA
ttcctttcctgcagtgcct

SEQ ID NO: 8452 - RNA, 19 nt, synthetic construct
  source 1..19: mol_type = other RNA
tttcctttcctgcagtgcc

SEQ ID NO: 8453 - RNA, 19 nt, synthetic construct
  source 1..19: mol_type = other RNA
ttttcctttcctgcagtgc

SEQ ID NO: 8454 - RNA, 19 nt, synthetic construct
  source 1..19: mol_type = other RNA
cttttcctttcctgcagtg

SEQ ID NO: 8455 - RNA, 19 nt, synthetic construct
  source 1..19: mol_type = other RNA
ccttttcctttcctgcagt

SEQ ID NO: 8456 - RNA, 19 nt, synthetic construct
  source 1..19: mol_type = other RNA
tccttttcctttcctgcag

SEQ ID NO: 8457 - RNA, 19 nt, synthetic construct
  source 1..19: mol_type = other RNA
ttccttttcctttcctgca

SEQ ID NO: 8458 - RNA, 19 nt, synthetic construct
  source 1..19: mol_type = other RNA
tttccttttcctttcctgc

SEQ ID NO: 8459 - RNA, 19 nt, synthetic construct
  source 1..19: mol_type = other RNA
ttttccttttcctttcctg

SEQ ID NO: 8460 - RNA, 19 nt, synthetic construct
  source 1..19: mol_type = other RNA
attttccttttcctttcct

SEQ ID NO: 8461 - RNA, 19 nt, synthetic construct
  source 1..19: mol_type = other RNA
aattttccttttcctttcc

SEQ ID NO: 8462 - RNA, 19 nt, synthetic construct
  source 1..19: mol_type = other RNA
aaattttccttttcctttc

SEQ ID NO: 8463 - RNA, 19 nt, synthetic construct
  source 1..19: mol_type = other RNA
aaaattttccttttccttt

SEQ ID NO: 8464 - RNA, 19 nt, synthetic construct
  source 1..19: mol_type = other RNA
caaaattttccttttcctt

SEQ ID NO: 8465 - RNA, 19 nt, synthetic construct
  source 1..19: mol_type = other RNA
ccaaaattttccttttcct

SEQ ID NO: 8466 - RNA, 19 nt, synthetic construct
  source 1..19: mol_type = other RNA
tccaaaattttccttttcc

SEQ ID NO: 8467 - RNA, 19 nt, synthetic construct
  source 1..19: mol_type = other RNA
gtccaaaattttccttttc

SEQ ID NO: 8468 - RNA, 19 nt, synthetic construct
  source 1..19: mol_type = other RNA
cgtccaaaattttcctttt

SEQ ID NO: 8469 - RNA, 19 nt, synthetic construct
  source 1..19: mol_type = other RNA
tcgtccaaaattttccttt

SEQ ID NO: 8470 - RNA, 19 nt, synthetic construct
  source 1..19: mol_type = other RNA
ttcgtccaaaattttcctt

SEQ ID NO: 8471 - RNA, 19 nt, synthetic construct
  source 1..19: mol_type = other RNA
cttcgtccaaaattttcct

SEQ ID NO: 8472 - RNA, 19 nt, synthetic construct
  source 1..19: mol_type = other RNA
gcttcgtccaaaattttcc

SEQ ID NO: 8473 - RNA, 19 nt, synthetic construct
  source 1..19: mol_type = other RNA
agcttcgtccaaaattttc

SEQ ID NO: 8474 - RNA, 19 nt, synthetic construct
  source 1..19: mol_type = other RNA
cagcttcgtccaaaatttt

SEQ ID NO: 8475 - RNA, 19 nt, synthetic construct
  source 1..19: mol_type = other RNA
acagcttcgtccaaaattt

SEQ ID NO: 8476 - RNA, 19 nt, synthetic construct
  source 1..19: mol_type = other RNA
cacagcttcgtccaaaatt

SEQ ID NO: 8477 - RNA, 19 nt, synthetic construct
  source 1..19: mol_type = other RNA
ccacagcttcgtccaaaat

SEQ ID NO: 8478 - RNA, 19 nt, synthetic construct
  source 1..19: mol_type = other RNA
tccacagcttcgtccaaaa

SEQ ID NO: 8479 - RNA, 19 nt, synthetic construct
  source 1..19: mol_type = other RNA
ttccacagcttcgtccaaa

SEQ ID NO: 8480 - RNA, 19 nt, synthetic construct
  source 1..19: mol_type = other RNA
attccacagcttcgtccaa

SEQ ID NO: 8481 - RNA, 19 nt, synthetic construct
  source 1..19: mol_type = other RNA
aattccacagcttcgtcca

SEQ ID NO: 8482 - RNA, 19 nt, synthetic construct
  source 1..19: mol_type = other RNA
taattccacagcttcgtcc

SEQ ID NO: 8483 - RNA, 19 nt, synthetic construct
  source 1..19: mol_type = other RNA
ttaattccacagcttcgtc

SEQ ID NO: 8484 - RNA, 19 nt, synthetic construct
  source 1..19: mol_type = other RNA
cttaattccacagcttcgt

SEQ ID NO: 8485 - RNA, 19 nt, synthetic construct
  source 1..19: mol_type = other RNA
acttaattccacagcttcg

SEQ ID NO: 8486 - RNA, 19 nt, synthetic construct
  source 1..19: mol_type = other RNA
gacttaattccacagcttc

SEQ ID NO: 8487 - RNA, 19 nt, synthetic construct
  source 1..19: mol_type = other RNA
tgacttaattccacagctt

SEQ ID NO: 8488 - RNA, 19 nt, synthetic construct
  source 1..19: mol_type = other RNA
ttgacttaattccacagct

SEQ ID NO: 8489 - RNA, 19 nt, synthetic construct
  source 1..19: mol_type = other RNA
cttgacttaattccacagc

SEQ ID NO: 8490 - RNA, 19 nt, synthetic construct
  source 1..19: mol_type = other RNA
tcttgacttaattccacag

SEQ ID NO: 8491 - RNA, 19 nt, synthetic construct
  source 1..19: mol_type = other RNA
atcttgacttaattccaca

SEQ ID NO: 8492 - RNA, 19 nt, synthetic construct
  source 1..19: mol_type = other RNA
gatcttgacttaattccac

SEQ ID NO: 8493 - RNA, 19 nt, synthetic construct
  source 1..19: mol_type = other RNA
tgatcttgacttaattcca

SEQ ID NO: 8494 - RNA, 19 nt, synthetic construct
  source 1..19: mol_type = other RNA
gtgatcttgacttaattcc

SEQ ID NO: 8495 - RNA, 19 nt, synthetic construct
  source 1..19: mol_type = other RNA
agtgatcttgacttaattc

SEQ ID NO: 8496 - RNA, 19 nt, synthetic construct
  source 1..19: mol_type = other RNA
aagtgatcttgacttaatt

SEQ ID NO: 8497 - RNA, 19 nt, synthetic construct
  source 1..19: mol_type = other RNA
aaagtgatcttgacttaat

SEQ ID NO: 8498 - RNA, 19 nt, synthetic construct
  source 1..19: mol_type = other RNA
taaagtgatcttgacttaa

SEQ ID NO: 8499 - RNA, 19 nt, synthetic construct
  source 1..19: mol_type = other RNA
ttaaagtgatcttgactta

SEQ ID NO: 8500 - RNA, 19 nt, synthetic construct
  source 1..19: mol_type = other RNA
tttaaagtgatcttgactt

SEQ ID NO: 8501 - RNA, 19 nt, synthetic construct
  source 1..19: mol_type = other RNA
ttttaaagtgatcttgact

SEQ ID NO: 8502 - RNA, 19 nt, synthetic construct
  source 1..19: mol_type = other RNA
tttttaaagtgatcttgac

SEQ ID NO: 8503 - RNA, 19 nt, synthetic construct
  source 1..19: mol_type = other RNA
ttttttaaagtgatcttga

SEQ ID NO: 8504 - RNA, 19 nt, synthetic construct
  source 1..19: mol_type = other RNA
attttttaaagtgatcttg

SEQ ID NO: 8505 - RNA, 19 nt, synthetic construct
  source 1..19: mol_type = other RNA
tattttttaaagtgatctt

SEQ ID NO: 8506 - RNA, 19 nt, synthetic construct
  source 1..19: mol_type = other RNA
gtattttttaaagtgatct

SEQ ID NO: 8507 - RNA, 19 nt, synthetic construct
  source 1..19: mol_type = other RNA
ggtattttttaaagtgatc

SEQ ID NO: 8508 - RNA, 19 nt, synthetic construct
  source 1..19: mol_type = other RNA
aggtattttttaaagtgat

SEQ ID NO: 8509 - RNA, 19 nt, synthetic construct
  source 1..19: mol_type = other RNA
taggtattttttaaagtga

SEQ ID NO: 8510 - RNA, 19 nt, synthetic construct
  source 1..19: mol_type = other RNA
ctaggtattttttaaagtg

SEQ ID NO: 8511 - RNA, 19 nt, synthetic construct
  source 1..19: mol_type = other RNA
actaggtattttttaaagt

SEQ ID NO: 8512 - RNA, 19 nt, synthetic construct
  source 1..19: mol_type = other RNA
tactaggtattttttaaag

SEQ ID NO: 8513 - RNA, 19 nt, synthetic construct
  source 1..19: mol_type = other RNA
ttactaggtattttttaaa

SEQ ID NO: 8514 - RNA, 19 nt, synthetic construct
  source 1..19: mol_type = other RNA
tttactaggtattttttaa

SEQ ID NO: 8515 - RNA, 19 nt, synthetic construct
  source 1..19: mol_type = other RNA
ttttactaggtatttttta

SEQ ID NO: 8516 - RNA, 19 nt, synthetic construct
  source 1..19: mol_type = other RNA
gttttactaggtatttttt

SEQ ID NO: 8517 - RNA, 19 nt, synthetic construct
  source 1..19: mol_type = other RNA
agttttactaggtattttt

SEQ ID NO: 8518 - RNA, 19 nt, synthetic construct
  source 1..19: mol_type = other RNA
aagttttactaggtatttt

SEQ ID NO: 8519 - RNA, 19 nt, synthetic construct
  source 1..19: mol_type = other RNA
taagttttactaggtattt

SEQ ID NO: 8520 - RNA, 19 nt, synthetic construct
  source 1..19: mol_type = other RNA
ttaagttttactaggtatt

SEQ ID NO: 8521 - RNA, 19 nt, synthetic construct
  source 1..19: mol_type = other RNA
cttaagttttactaggtat

SEQ ID NO: 8522 - RNA, 19 nt, synthetic construct
  source 1..19: mol_type = other RNA
acttaagttttactaggta

SEQ ID NO: 8523 - RNA, 19 nt, synthetic construct
  source 1..19: mol_type = other RNA
gacttaagttttactaggt

SEQ ID NO: 8524 - RNA, 19 nt, synthetic construct
  source 1..19: mol_type = other RNA
tgacttaagttttactagg

SEQ ID NO: 8525 - RNA, 19 nt, synthetic construct
  source 1..19: mol_type = other RNA
ttgacttaagttttactag

SEQ ID NO: 8526 - RNA, 19 nt, synthetic construct
  source 1..19: mol_type = other RNA
attgacttaagttttacta

SEQ ID NO: 8527 - RNA, 19 nt, synthetic construct
  source 1..19: mol_type = other RNA
gattgacttaagttttact

SEQ ID NO: 8528 - RNA, 19 nt, synthetic construct
  source 1..19: mol_type = other RNA
tgattgacttaagttttac

SEQ ID NO: 8529 - RNA, 19 nt, synthetic construct
  source 1..19: mol_type = other RNA
ttgattgacttaagtttta

SEQ ID NO: 8530 - RNA, 19 nt, synthetic construct
  source 1..19: mol_type = other RNA
attgattgacttaagtttt

SEQ ID NO: 8531 - RNA, 19 nt, synthetic construct
  source 1..19: mol_type = other RNA
gattgattgacttaagttt

SEQ ID NO: 8532 - RNA, 19 nt, synthetic construct
  source 1..19: mol_type = other RNA
ggattgattgacttaagtt

SEQ ID NO: 8533 - RNA, 19 nt, synthetic construct
  source 1..19: mol_type = other RNA
tggattgattgacttaagt

SEQ ID NO: 8534 - RNA, 19 nt, synthetic construct
  source 1..19: mol_type = other RNA
gtggattgattgacttaag

SEQ ID NO: 8535 - RNA, 19 nt, synthetic construct
  source 1..19: mol_type = other RNA
ggtggattgattgacttaa

SEQ ID NO: 8536 - RNA, 19 nt, synthetic construct
  source 1..19: mol_type = other RNA
aggtggattgattgactta

SEQ ID NO: 8537 - RNA, 19 nt, synthetic construct
  source 1..19: mol_type = other RNA
aaggtggattgattgactt

SEQ ID NO: 8538 - RNA, 19 nt, synthetic construct
  source 1..19: mol_type = other RNA
caaggtggattgattgact

SEQ ID NO: 8539 - RNA, 19 nt, synthetic construct
  source 1..19: mol_type = other RNA
acaaggtggattgattgac

SEQ ID NO: 8540 - RNA, 19 nt, synthetic construct
  source 1..19: mol_type = other RNA
cacaaggtggattgattga

SEQ ID NO: 8541 - RNA, 19 nt, synthetic construct
  source 1..19: mol_type = other RNA
acacaaggtggattgattg

SEQ ID NO: 8542 - RNA, 19 nt, synthetic construct
  source 1..19: mol_type = other RNA
cacacaaggtggattgatt

SEQ ID NO: 8543 - RNA, 19 nt, synthetic construct
  source 1..19: mol_type = other RNA
gcacacaaggtggattgat

SEQ ID NO: 8544 - RNA, 19 nt, synthetic construct
  source 1..19: mol_type = other RNA
ggcacacaaggtggattga

SEQ ID NO: 8545 - RNA, 19 nt, synthetic construct
  source 1..19: mol_type = other RNA
aggcacacaaggtggattg

SEQ ID NO: 8546 - RNA, 19 nt, synthetic construct
  source 1..19: mol_type = other RNA
aaggcacacaaggtggatt

SEQ ID NO: 8547 - RNA, 19 nt, synthetic construct
  source 1..19: mol_type = other RNA
aaaggcacacaaggtggat

SEQ ID NO: 8548 - RNA, 19 nt, synthetic construct
  source 1..19: mol_type = other RNA
aaaaggcacacaaggtgga

SEQ ID NO: 8549 - RNA, 19 nt, synthetic construct
  source 1..19: mol_type = other RNA
aaaaaggcacacaaggtgg

SEQ ID NO: 8550 - RNA, 19 nt, synthetic construct
  source 1..19: mol_type = other RNA
aaaaaaggcacacaaggtg

SEQ ID NO: 8551 - RNA, 19 nt, synthetic construct
  source 1..19: mol_type = other RNA
aaaaaaaggcacacaaggt

SEQ ID NO: 8552 - RNA, 19 nt, synthetic construct
  source 1..19: mol_type = other RNA
caaaaaaaggcacacaagg

SEQ ID NO: 8553 - RNA, 19 nt, synthetic construct
  source 1..19: mol_type = other RNA
ccaaaaaaaggcacacaag

SEQ ID NO: 8554 - RNA, 19 nt, synthetic construct
  source 1..19: mol_type = other RNA
tccaaaaaaaggcacacaa

SEQ ID NO: 8555 - RNA, 19 nt, synthetic construct
  source 1..19: mol_type = other RNA
ttccaaaaaaaggcacaca

SEQ ID NO: 8556 - RNA, 19 nt, synthetic construct
  source 1..19: mol_type = other RNA
attccaaaaaaaggcacac

SEQ ID NO: 8557 - RNA, 19 nt, synthetic construct
  source 1..19: mol_type = other RNA
tattccaaaaaaaggcaca

SEQ ID NO: 8558 - RNA, 19 nt, synthetic construct
  source 1..19: mol_type = other RNA
atattccaaaaaaaggcac

SEQ ID NO: 8559 - RNA, 19 nt, synthetic construct
  source 1..19: mol_type = other RNA
tatattccaaaaaaaggca

SEQ ID NO: 8560 - RNA, 19 nt, synthetic construct
  source 1..19: mol_type = other RNA
atatattccaaaaaaaggc

SEQ ID NO: 8561 - RNA, 19 nt, synthetic construct
  source 1..19: mol_type = other RNA
aatatattccaaaaaaagg

SEQ ID NO: 8562 - RNA, 19 nt, synthetic construct
  source 1..19: mol_type = other RNA
aaatatattccaaaaaaag

SEQ ID NO: 8563 - RNA, 19 nt, synthetic construct
  source 1..19: mol_type = other RNA
taaatatattccaaaaaaa

SEQ ID NO: 8564 - RNA, 19 nt, synthetic construct
  source 1..19: mol_type = other RNA
ttaaatatattccaaaaaa

SEQ ID NO: 8565 - RNA, 19 nt, synthetic construct
  source 1..19: mol_type = other RNA
gttaaatatattccaaaaa

SEQ ID NO: 8566 - RNA, 19 nt, synthetic construct
  source 1..19: mol_type = other RNA
tgttaaatatattccaaaa

SEQ ID NO: 8567 - RNA, 19 nt, synthetic construct
  source 1..19: mol_type = other RNA
ttgttaaatatattccaaa

SEQ ID NO: 8568 - RNA, 19 nt, synthetic construct
  source 1..19: mol_type = other RNA
tttgttaaatatattccaa

SEQ ID NO: 8569 - RNA, 19 nt, synthetic construct
  source 1..19: mol_type = other RNA
atttgttaaatatattcca

SEQ ID NO: 8570 - RNA, 19 nt, synthetic construct
  source 1..19: mol_type = other RNA
tatttgttaaatatattcc

SEQ ID NO: 8571 - RNA, 19 nt, synthetic construct
  source 1..19: mol_type = other RNA
atatttgttaaatatattc

SEQ ID NO: 8572 - RNA, 19 nt, synthetic construct
  source 1..19: mol_type = other RNA
aatatttgttaaatatatt

SEQ ID NO: 8573 - RNA, 19 nt, synthetic construct
  source 1..19: mol_type = other RNA
gaatatttgttaaatatat

SEQ ID NO: 8574 - RNA, 19 nt, synthetic construct
  source 1..19: mol_type = other RNA
agaatatttgttaaatata

SEQ ID NO: 8575 - RNA, 19 nt, synthetic construct
  source 1..19: mol_type = other RNA
cagaatatttgttaaatat

SEQ ID NO: 8576 - RNA, 19 nt, synthetic construct
  source 1..19: mol_type = other RNA
tcagaatatttgttaaata

SEQ ID NO: 8577 - RNA, 19 nt, synthetic construct
  source 1..19: mol_type = other RNA
ttcagaatatttgttaaat

SEQ ID NO: 8578 - RNA, 19 nt, synthetic construct
  source 1..19: mol_type = other RNA
cttcagaatatttgttaaa

SEQ ID NO: 8579 - RNA, 19 nt, synthetic construct
  source 1..19: mol_type = other RNA
tcttcagaatatttgttaa

SEQ ID NO: 8580 - RNA, 19 nt, synthetic construct
  source 1..19: mol_type = other RNA
gtcttcagaatatttgtta

SEQ ID NO: 8581 - RNA, 19 nt, synthetic construct
  source 1..19: mol_type = other RNA
ggtcttcagaatatttgtt

SEQ ID NO: 8582 - RNA, 19 nt, synthetic construct
  source 1..19: mol_type = other RNA
cggtcttcagaatatttgt

SEQ ID NO: 8583 - RNA, 19 nt, synthetic construct
  source 1..19: mol_type = other RNA
tcggtcttcagaatatttg

SEQ ID NO: 8584 - RNA, 19 nt, synthetic construct
  source 1..19: mol_type = other RNA
ttcggtcttcagaatattt

SEQ ID NO: 8585 - RNA, 19 nt, synthetic construct
  source 1..19: mol_type = other RNA
cttcggtcttcagaatatt

SEQ ID NO: 8586 - RNA, 19 nt, synthetic construct
  source 1..19: mol_type = other RNA
tcttcggtcttcagaatat

SEQ ID NO: 8587 - RNA, 19 nt, synthetic construct
  source 1..19: mol_type = other RNA
ttcttcggtcttcagaata

SEQ ID NO: 8588 - RNA, 19 nt, synthetic construct
  source 1..19: mol_type = other RNA
cttcttcggtcttcagaat

SEQ ID NO: 8589 - RNA, 19 nt, synthetic construct
  source 1..19: mol_type = other RNA
ccttcttcggtcttcagaa

SEQ ID NO: 8590 - RNA, 19 nt, synthetic construct
  source 1..19: mol_type = other RNA
cccttcttcggtcttcaga

SEQ ID NO: 8591 - RNA, 19 nt, synthetic construct
  source 1..19: mol_type = other RNA
tcccttcttcggtcttcag

SEQ ID NO: 8592 - RNA, 19 nt, synthetic construct
  source 1..19: mol_type = other RNA
ttcccttcttcggtcttca

SEQ ID NO: 8593 - RNA, 19 nt, synthetic construct
  source 1..19: mol_type = other RNA
attcccttcttcggtcttc

SEQ ID NO: 8594 - RNA, 19 nt, synthetic construct
  source 1..19: mol_type = other RNA
tattcccttcttcggtctt

SEQ ID NO: 8595 - RNA, 19 nt, synthetic construct
  source 1..19: mol_type = other RNA
ttattcccttcttcggtct

SEQ ID NO: 8596 - RNA, 19 nt, synthetic construct
  source 1..19: mol_type = other RNA
attattcccttcttcggtc

SEQ ID NO: 8597 - RNA, 19 nt, synthetic construct
  source 1..19: mol_type = other RNA
cattattcccttcttcggt

SEQ ID NO: 8598 - RNA, 19 nt, synthetic construct
  source 1..19: mol_type = other RNA
tcattattcccttcttcgg

SEQ ID NO: 8599 - RNA, 19 nt, synthetic construct
  source 1..19: mol_type = other RNA
atcattattcccttcttcg

SEQ ID NO: 8600 - RNA, 19 nt, synthetic construct
  source 1..19: mol_type = other RNA
aatcattattcccttcttc

SEQ ID NO: 8601 - RNA, 19 nt, synthetic construct
  source 1..19: mol_type = other RNA
aaatcattattcccttctt

SEQ ID NO: 8602 - RNA, 19 nt, synthetic construct
  source 1..19: mol_type = other RNA
aaaatcattattcccttct

SEQ ID NO: 8603 - RNA, 19 nt, synthetic construct
  source 1..19: mol_type = other RNA
aaaaatcattattcccttc

SEQ ID NO: 8604 - RNA, 19 nt, synthetic construct
  source 1..19: mol_type = other RNA
aaaaaatcattattccctt

SEQ ID NO: 8605 - RNA, 19 nt, synthetic construct
  source 1..19: mol_type = other RNA
taaaaaatcattattccct

SEQ ID NO: 8606 - RNA, 19 nt, synthetic construct
  source 1..19: mol_type = other RNA
ttaaaaaatcattattccc

SEQ ID NO: 8607 - RNA, 19 nt, synthetic construct
  source 1..19: mol_type = other RNA
tttaaaaaatcattattcc

SEQ ID NO: 8608 - RNA, 19 nt, synthetic construct
  source 1..19: mol_type = other RNA
ttttaaaaaatcattattc

SEQ ID NO: 8609 - RNA, 19 nt, synthetic construct
  source 1..19: mol_type = other RNA
tttttaaaaaatcattatt

SEQ ID NO: 8610 - RNA, 19 nt, synthetic construct
  source 1..19: mol_type = other RNA
ttttttaaaaaatcattat

SEQ ID NO: 8611 - RNA, 19 nt, synthetic construct
  source 1..19: mol_type = other RNA
cttttttaaaaaatcatta

SEQ ID NO: 8612 - RNA, 19 nt, synthetic construct
  source 1..19: mol_type = other RNA
tcttttttaaaaaatcatt

SEQ ID NO: 8613 - RNA, 19 nt, synthetic construct
  source 1..19: mol_type = other RNA
ttcttttttaaaaaatcat

SEQ ID NO: 8614 - RNA, 19 nt, synthetic construct
  source 1..19: mol_type = other RNA
tttcttttttaaaaaatca

SEQ ID NO: 8615 - RNA, 19 nt, synthetic construct
  source 1..19: mol_type = other RNA
ctttcttttttaaaaaatc

SEQ ID NO: 8616 - RNA, 19 nt, synthetic construct
  source 1..19: mol_type = other RNA
cctttcttttttaaaaaat

SEQ ID NO: 8617 - RNA, 19 nt, synthetic construct
  source 1..19: mol_type = other RNA
ccctttcttttttaaaaaa

SEQ ID NO: 8618 - RNA, 19 nt, synthetic construct
  source 1..19: mol_type = other RNA
tccctttcttttttaaaaa

SEQ ID NO: 8619 - RNA, 19 nt, synthetic construct
  source 1..19: mol_type = other RNA
ttccctttcttttttaaaa

SEQ ID NO: 8620 - RNA, 19 nt, synthetic construct
  source 1..19: mol_type = other RNA
tttccctttcttttttaaa

SEQ ID NO: 8621 - RNA, 19 nt, synthetic construct
  source 1..19: mol_type = other RNA
ctttccctttcttttttaa

SEQ ID NO: 8622 - RNA, 19 nt, synthetic construct
  source 1..19: mol_type = other RNA
tctttccctttctttttta

SEQ ID NO: 8623 - RNA, 19 nt, synthetic construct
  source 1..19: mol_type = other RNA
atctttccctttctttttt

SEQ ID NO: 8624 - RNA, 19 nt, synthetic construct
  source 1..19: mol_type = other RNA
aatctttccctttcttttt

SEQ ID NO: 8625 - RNA, 19 nt, synthetic construct
  source 1..19: mol_type = other RNA
aaatctttccctttctttt

SEQ ID NO: 8626 - RNA, 19 nt, synthetic construct
  source 1..19: mol_type = other RNA
taaatctttccctttcttt

SEQ ID NO: 8627 - RNA, 19 nt, synthetic construct
  source 1..19: mol_type = other RNA
ttaaatctttccctttctt

SEQ ID NO: 8628 - RNA, 19 nt, synthetic construct
  source 1..19: mol_type = other RNA
attaaatctttccctttct

SEQ ID NO: 8629 - RNA, 19 nt, synthetic construct
  source 1..19: mol_type = other RNA
gattaaatctttccctttc

SEQ ID NO: 8630 - RNA, 19 nt, synthetic construct
  source 1..19: mol_type = other RNA
tgattaaatctttcccttt

SEQ ID NO: 8631 - RNA, 19 nt, synthetic construct
  source 1..19: mol_type = other RNA
ttgattaaatctttccctt

SEQ ID NO: 8632 - RNA, 19 nt, synthetic construct
  source 1..19: mol_type = other RNA
attgattaaatctttccct

SEQ ID NO: 8633 - RNA, 19 nt, synthetic construct
  source 1..19: mol_type = other RNA
aattgattaaatctttccc

SEQ ID NO: 8634 - RNA, 19 nt, synthetic construct
  source 1..19: mol_type = other RNA
aaattgattaaatctttcc

SEQ ID NO: 8635 - RNA, 19 nt, synthetic construct
  source 1..19: mol_type = other RNA
gaaattgattaaatctttc

SEQ ID NO: 8636 - RNA, 19 nt, synthetic construct
  source 1..19: mol_type = other RNA
tgaaattgattaaatcttt

SEQ ID NO: 8637 - RNA, 19 nt, synthetic construct
  source 1..19: mol_type = other RNA
ctgaaattgattaaatctt

SEQ ID NO: 8638 - RNA, 19 nt, synthetic construct
  source 1..19: mol_type = other RNA
actgaaattgattaaatct

SEQ ID NO: 8639 - RNA, 19 nt, synthetic construct
  source 1..19: mol_type = other RNA
tactgaaattgattaaatc

SEQ ID NO: 8640 - RNA, 19 nt, synthetic construct
  source 1..19: mol_type = other RNA
ttactgaaattgattaaat

SEQ ID NO: 8641 - RNA, 19 nt, synthetic construct
  source 1..19: mol_type = other RNA
cttactgaaattgattaaa

SEQ ID NO: 8642 - RNA, 19 nt, synthetic construct
  source 1..19: mol_type = other RNA
tcttactgaaattgattaa

SEQ ID NO: 8643 - RNA, 19 nt, synthetic construct
  source 1..19: mol_type = other RNA
ctcttactgaaattgatta

SEQ ID NO: 8644 - RNA, 19 nt, synthetic construct
  source 1..19: mol_type = other RNA
cctcttactgaaattgatt

SEQ ID NO: 8645 - RNA, 19 nt, synthetic construct
  source 1..19: mol_type = other RNA
tcctcttactgaaattgat

SEQ ID NO: 8646 - RNA, 19 nt, synthetic construct
  source 1..19: mol_type = other RNA
ctcctcttactgaaattga

SEQ ID NO: 8647 - RNA, 19 nt, synthetic construct
  source 1..19: mol_type = other RNA
cctcctcttactgaaattg

SEQ ID NO: 8648 - RNA, 19 nt, synthetic construct
  source 1..19: mol_type = other RNA
tcctcctcttactgaaatt

SEQ ID NO: 8649 - RNA, 19 nt, synthetic construct
  source 1..19: mol_type = other RNA
ttcctcctcttactgaaat

SEQ ID NO: 8650 - RNA, 19 nt, synthetic construct
  source 1..19: mol_type = other RNA
tttcctcctcttactgaaa

SEQ ID NO: 8651 - RNA, 19 nt, synthetic construct
  source 1..19: mol_type = other RNA
ctttcctcctcttactgaa

SEQ ID NO: 8652 - RNA, 19 nt, synthetic construct
  source 1..19: mol_type = other RNA
actttcctcctcttactga

SEQ ID NO: 8653 - RNA, 19 nt, synthetic construct
  source 1..19: mol_type = other RNA
tactttcctcctcttactg

SEQ ID NO: 8654 - RNA, 19 nt, synthetic construct
  source 1..19: mol_type = other RNA
ctactttcctcctcttact

SEQ ID NO: 8655 - RNA, 19 nt, synthetic construct
  source 1..19: mol_type = other RNA
gctactttcctcctcttac

SEQ ID NO: 8656 - RNA, 19 nt, synthetic construct
  source 1..19: mol_type = other RNA
agctactttcctcctctta

SEQ ID NO: 8657 - RNA, 19 nt, synthetic construct
  source 1..19: mol_type = other RNA
cagctactttcctcctctt

SEQ ID NO: 8658 - RNA, 19 nt, synthetic construct
  source 1..19: mol_type = other RNA
tcagctactttcctcctct

SEQ ID NO: 8659 - RNA, 19 nt, synthetic construct
  source 1..19: mol_type = other RNA
ttcagctactttcctcctc

SEQ ID NO: 8660 - RNA, 19 nt, synthetic construct
  source 1..19: mol_type = other RNA
tttcagctactttcctcct

SEQ ID NO: 8661 - RNA, 19 nt, synthetic construct
  source 1..19: mol_type = other RNA
atttcagctactttcctcc

SEQ ID NO: 8662 - RNA, 19 nt, synthetic construct
  source 1..19: mol_type = other RNA
aatttcagctactttcctc

SEQ ID NO: 8663 - RNA, 19 nt, synthetic construct
  source 1..19: mol_type = other RNA
taatttcagctactttcct

SEQ ID NO: 8664 - RNA, 19 nt, synthetic construct
  source 1..19: mol_type = other RNA
gtaatttcagctactttcc

SEQ ID NO: 8665 - RNA, 19 nt, synthetic construct
  source 1..19: mol_type = other RNA
agtaatttcagctactttc

SEQ ID NO: 8666 - RNA, 19 nt, synthetic construct
  source 1..19: mol_type = other RNA
cagtaatttcagctacttt

SEQ ID NO: 8667 - RNA, 19 nt, synthetic construct
  source 1..19: mol_type = other RNA
ccagtaatttcagctactt

SEQ ID NO: 8668 - RNA, 19 nt, synthetic construct
  source 1..19: mol_type = other RNA
tccagtaatttcagctact

SEQ ID NO: 8669 - RNA, 19 nt, synthetic construct
  source 1..19: mol_type = other RNA
ctccagtaatttcagctac

SEQ ID NO: 8670 - RNA, 19 nt, synthetic construct
  source 1..19: mol_type = other RNA
tctccagtaatttcagcta

SEQ ID NO: 8671 - RNA, 19 nt, synthetic construct
  source 1..19: mol_type = other RNA
ttctccagtaatttcagct

SEQ ID NO: 8672 - RNA, 19 nt, synthetic construct
  source 1..19: mol_type = other RNA
tttctccagtaatttcagc

SEQ ID NO: 8673 - RNA, 19 nt, synthetic construct
  source 1..19: mol_type = other RNA
atttctccagtaatttcag

SEQ ID NO: 8674 - RNA, 19 nt, synthetic construct
  source 1..19: mol_type = other RNA
aatttctccagtaatttca

SEQ ID NO: 8675 - RNA, 19 nt, synthetic construct
  source 1..19: mol_type = other RNA
gaatttctccagtaatttc

SEQ ID NO: 8676 - RNA, 19 nt, synthetic construct
  source 1..19: mol_type = other RNA
tgaatttctccagtaattt

SEQ ID NO: 8677 - RNA, 19 nt, synthetic construct
  source 1..19: mol_type = other RNA
ctgaatttctccagtaatt

SEQ ID NO: 8678 - RNA, 19 nt, synthetic construct
  source 1..19: mol_type = other RNA
gctgaatttctccagtaat

SEQ ID NO: 8679 - RNA, 19 nt, synthetic construct
  source 1..19: mol_type = other RNA
tgctgaatttctccagtaa

SEQ ID NO: 8680 - RNA, 19 nt, synthetic construct
  source 1..19: mol_type = other RNA
ctgctgaatttctccagta

SEQ ID NO: 8681 - RNA, 19 nt, synthetic construct
  source 1..19: mol_type = other RNA
actgctgaatttctccagt

SEQ ID NO: 8682 - RNA, 19 nt, synthetic construct
  source 1..19: mol_type = other RNA
tactgctgaatttctccag

SEQ ID NO: 8683 - RNA, 19 nt, synthetic construct
  source 1..19: mol_type = other RNA
atactgctgaatttctcca

SEQ ID NO: 8684 - RNA, 19 nt, synthetic construct
  source 1..19: mol_type = other RNA
gatactgctgaatttctcc

SEQ ID NO: 8685 - RNA, 19 nt, synthetic construct
  source 1..19: mol_type = other RNA
tgatactgctgaatttctc

SEQ ID NO: 8686 - RNA, 19 nt, synthetic construct
  source 1..19: mol_type = other RNA
ctgatactgctgaatttct

SEQ ID NO: 8687 - RNA, 19 nt, synthetic construct
  source 1..19: mol_type = other RNA
tctgatactgctgaatttc

SEQ ID NO: 8688 - RNA, 19 nt, synthetic construct
  source 1..19: mol_type = other RNA
ttctgatactgctgaattt

SEQ ID NO: 8689 - RNA, 19 nt, synthetic construct
  source 1..19: mol_type = other RNA
attctgatactgctgaatt

SEQ ID NO: 8690 - RNA, 19 nt, synthetic construct
  source 1..19: mol_type = other RNA
gattctgatactgctgaat

SEQ ID NO: 8691 - RNA, 19 nt, synthetic construct
  source 1..19: mol_type = other RNA
tgattctgatactgctgaa

SEQ ID NO: 8692 - RNA, 19 nt, synthetic construct
  source 1..19: mol_type = other RNA
ctgattctgatactgctga

SEQ ID NO: 8693 - RNA, 19 nt, synthetic construct
  source 1..19: mol_type = other RNA
gctgattctgatactgctg

SEQ ID NO: 8694 - RNA, 19 nt, synthetic construct
  source 1..19: mol_type = other RNA
ggctgattctgatactgct

SEQ ID NO: 8695 - RNA, 19 nt, synthetic construct
  source 1..19: mol_type = other RNA
aggctgattctgatactgc

SEQ ID NO: 8696 - RNA, 19 nt, synthetic construct
  source 1..19: mol_type = other RNA
aaggctgattctgatactg

SEQ ID NO: 8697 - RNA, 19 nt, synthetic construct
  source 1..19: mol_type = other RNA
taaggctgattctgatact

SEQ ID NO: 8698 - RNA, 19 nt, synthetic construct
  source 1..19: mol_type = other RNA
gtaaggctgattctgatac

SEQ ID NO: 8699 - RNA, 19 nt, synthetic construct
  source 1..19: mol_type = other RNA
agtaaggctgattctgata

SEQ ID NO: 8700 - RNA, 19 nt, synthetic construct
  source 1..19: mol_type = other RNA
cagtaaggctgattctgat

SEQ ID NO: 8701 - RNA, 19 nt, synthetic construct
  source 1..19: mol_type = other RNA
acagtaaggctgattctga

SEQ ID NO: 8702 - RNA, 19 nt, synthetic construct
  source 1..19: mol_type = other RNA
aacagtaaggctgattctg

SEQ ID NO: 8703 - RNA, 19 nt, synthetic construct
  source 1..19: mol_type = other RNA
aaacagtaaggctgattct

SEQ ID NO: 8704 - RNA, 19 nt, synthetic construct
  source 1..19: mol_type = other RNA
taaacagtaaggctgattc

SEQ ID NO: 8705 - RNA, 19 nt, synthetic construct
  source 1..19: mol_type = other RNA
gtaaacagtaaggctgatt

SEQ ID NO: 8706 - RNA, 19 nt, synthetic construct
  source 1..19: mol_type = other RNA
cgtaaacagtaaggctgat

SEQ ID NO: 8707 - RNA, 19 nt, synthetic construct
  source 1..19: mol_type = other RNA
ccgtaaacagtaaggctga

SEQ ID NO: 8708 - RNA, 19 nt, synthetic construct
  source 1..19: mol_type = other RNA
tccgtaaacagtaaggctg

SEQ ID NO: 8709 - RNA, 19 nt, synthetic construct
  source 1..19: mol_type = other RNA
atccgtaaacagtaaggct

SEQ ID NO: 8710 - RNA, 19 nt, synthetic construct
  source 1..19: mol_type = other RNA
tatccgtaaacagtaaggc

SEQ ID NO: 8711 - RNA, 19 nt, synthetic construct
  source 1..19: mol_type = other RNA
ctatccgtaaacagtaagg

SEQ ID NO: 8712 - RNA, 19 nt, synthetic construct
  source 1..19: mol_type = other RNA
tctatccgtaaacagtaag

SEQ ID NO: 8713 - RNA, 19 nt, synthetic construct
  source 1..19: mol_type = other RNA
ttctatccgtaaacagtaa

SEQ ID NO: 8714 - RNA, 19 nt, synthetic construct
  source 1..19: mol_type = other RNA
gttctatccgtaaacagta

SEQ ID NO: 8715 - RNA, 19 nt, synthetic construct
  source 1..19: mol_type = other RNA
ggttctatccgtaaacagt

SEQ ID NO: 8716 - RNA, 19 nt, synthetic construct
  source 1..19: mol_type = other RNA
tggttctatccgtaaacag

SEQ ID NO: 8717 - RNA, 19 nt, synthetic construct
  source 1..19: mol_type = other RNA
ctggttctatccgtaaaca

SEQ ID NO: 8718 - RNA, 19 nt, synthetic construct
  source 1..19: mol_type = other RNA
tctggttctatccgtaaac

SEQ ID NO: 8719 - RNA, 19 nt, synthetic construct
  source 1..19: mol_type = other RNA
atctggttctatccgtaaa

SEQ ID NO: 8720 - RNA, 19 nt, synthetic construct
  source 1..19: mol_type = other RNA
tatctggttctatccgtaa

SEQ ID NO: 8721 - RNA, 19 nt, synthetic construct
  source 1..19: mol_type = other RNA
atatctggttctatccgta

SEQ ID NO: 8722 - RNA, 19 nt, synthetic construct
  source 1..19: mol_type = other RNA
catatctggttctatccgt

SEQ ID NO: 8723 - RNA, 19 nt, synthetic construct
  source 1..19: mol_type = other RNA
tcatatctggttctatccg

SEQ ID NO: 8724 - RNA, 19 nt, synthetic construct
  source 1..19: mol_type = other RNA
ctcatatctggttctatcc

SEQ ID NO: 8725 - RNA, 19 nt, synthetic construct
  source 1..19: mol_type = other RNA
cctcatatctggttctatc

SEQ ID NO: 8726 - RNA, 19 nt, synthetic construct
  source 1..19: mol_type = other RNA
tcctcatatctggttctat

SEQ ID NO: 8727 - RNA, 19 nt, synthetic construct
  source 1..19: mol_type = other RNA
ctcctcatatctggttcta

SEQ ID NO: 8728 - RNA, 19 nt, synthetic construct
  source 1..19: mol_type = other RNA
tctcctcatatctggttct

SEQ ID NO: 8729 - RNA, 19 nt, synthetic construct
  source 1..19: mol_type = other RNA
atctcctcatatctggttc

SEQ ID NO: 8730 - RNA, 19 nt, synthetic construct
  source 1..19: mol_type = other RNA
aatctcctcatatctggtt

SEQ ID NO: 8731 - RNA, 19 nt, synthetic construct
  source 1..19: mol_type = other RNA
gaatctcctcatatctggt

SEQ ID NO: 8732 - RNA, 19 nt, synthetic construct
  source 1..19: mol_type = other RNA
agaatctcctcatatctgg

SEQ ID NO: 8733 - RNA, 19 nt, synthetic construct
  source 1..19: mol_type = other RNA
aagaatctcctcatatctg

SEQ ID NO: 8734 - RNA, 19 nt, synthetic construct
  source 1..19: mol_type = other RNA
aaagaatctcctcatatct

SEQ ID NO: 8735 - RNA, 19 nt, synthetic construct
  source 1..19: mol_type = other RNA
caaagaatctcctcatatc

SEQ ID NO: 8736 - RNA, 19 nt, synthetic construct
  source 1..19: mol_type = other RNA
tcaaagaatctcctcatat

SEQ ID NO: 8737 - RNA, 19 nt, synthetic construct
  source 1..19: mol_type = other RNA
ttcaaagaatctcctcata

SEQ ID NO: 8738 - RNA, 19 nt, synthetic construct
  source 1..19: mol_type = other RNA
tttcaaagaatctcctcat

SEQ ID NO: 8739 - RNA, 19 nt, synthetic construct
  source 1..19: mol_type = other RNA
ttttcaaagaatctcctca

SEQ ID NO: 8740 - RNA, 19 nt, synthetic construct
  source 1..19: mol_type = other RNA
gttttcaaagaatctcctc

SEQ ID NO: 8741 - RNA, 19 nt, synthetic construct
  source 1..19: mol_type = other RNA
ggttttcaaagaatctcct

SEQ ID NO: 8742 - RNA, 19 nt, synthetic construct
  source 1..19: mol_type = other RNA
aggttttcaaagaatctcc

SEQ ID NO: 8743 - RNA, 19 nt, synthetic construct
  source 1..19: mol_type = other RNA
aaggttttcaaagaatctc

SEQ ID NO: 8744 - RNA, 19 nt, synthetic construct
  source 1..19: mol_type = other RNA
taaggttttcaaagaatct

SEQ ID NO: 8745 - RNA, 19 nt, synthetic construct
  source 1..19: mol_type = other RNA
ttaaggttttcaaagaatc

SEQ ID NO: 8746 - RNA, 19 nt, synthetic construct
  source 1..19: mol_type = other RNA
gttaaggttttcaaagaat

SEQ ID NO: 8747 - RNA, 19 nt, synthetic construct
  source 1..19: mol_type = other RNA
ggttaaggttttcaaagaa

SEQ ID NO: 8748 - RNA, 19 nt, synthetic construct
  source 1..19: mol_type = other RNA
gggttaaggttttcaaaga

SEQ ID NO: 8749 - RNA, 19 nt, synthetic construct
  source 1..19: mol_type = other RNA
ggggttaaggttttcaaag

SEQ ID NO: 8750 - RNA, 19 nt, synthetic construct
  source 1..19: mol_type = other RNA
tggggttaaggttttcaaa

SEQ ID NO: 8751 - RNA, 19 nt, synthetic construct
  source 1..19: mol_type = other RNA
atggggttaaggttttcaa

SEQ ID NO: 8752 - RNA, 19 nt, synthetic construct
  source 1..19: mol_type = other RNA
catggggttaaggttttca

SEQ ID NO: 8753 - RNA, 19 nt, synthetic construct
  source 1..19: mol_type = other RNA
ccatggggttaaggttttc

SEQ ID NO: 8754 - RNA, 19 nt, synthetic construct
  source 1..19: mol_type = other RNA
cccatggggttaaggtttt

SEQ ID NO: 8755 - RNA, 19 nt, synthetic construct
  source 1..19: mol_type = other RNA
tcccatggggttaaggttt

SEQ ID NO: 8756 - RNA, 19 nt, synthetic construct
  source 1..19: mol_type = other RNA
ttcccatggggttaaggtt

SEQ ID NO: 8757 - RNA, 19 nt, synthetic construct
  source 1..19: mol_type = other RNA
cttcccatggggttaaggt

SEQ ID NO: 8758 - RNA, 19 nt, synthetic construct
  source 1..19: mol_type = other RNA
acttcccatggggttaagg

SEQ ID NO: 8759 - RNA, 19 nt, synthetic construct
  source 1..19: mol_type = other RNA
cacttcccatggggttaag

SEQ ID NO: 8760 - RNA, 19 nt, synthetic construct
  source 1..19: mol_type = other RNA
gcacttcccatggggttaa

SEQ ID NO: 8761 - RNA, 19 nt, synthetic construct
  source 1..19: mol_type = other RNA
tgcacttcccatggggtta

SEQ ID NO: 8762 - RNA, 19 nt, synthetic construct
  source 1..19: mol_type = other RNA
atgcacttcccatggggtt

SEQ ID NO: 8763 - RNA, 19 nt, synthetic construct
  source 1..19: mol_type = other RNA
gatgcacttcccatggggt

SEQ ID NO: 8764 - RNA, 19 nt, synthetic construct
  source 1..19: mol_type = other RNA
agatgcacttcccatgggg

SEQ ID NO: 8765 - RNA, 19 nt, synthetic construct
  source 1..19: mol_type = other RNA
cagatgcacttcccatggg

SEQ ID NO: 8766 - RNA, 19 nt, synthetic construct
  source 1..19: mol_type = other RNA
tcagatgcacttcccatgg

SEQ ID NO: 8767 - RNA, 19 nt, synthetic construct
  source 1..19: mol_type = other RNA
ttcagatgcacttcccatg

SEQ ID NO: 8768 - RNA, 19 nt, synthetic construct
  source 1..19: mol_type = other RNA
tttcagatgcacttcccat

SEQ ID NO: 8769 - RNA, 19 nt, synthetic construct
  source 1..19: mol_type = other RNA
ttttcagatgcacttccca

SEQ ID NO: 8770 - RNA, 19 nt, synthetic construct
  source 1..19: mol_type = other RNA
tttttcagatgcacttccc

SEQ ID NO: 8771 - RNA, 19 nt, synthetic construct
  source 1..19: mol_type = other RNA
ctttttcagatgcacttcc

SEQ ID NO: 8772 - RNA, 19 nt, synthetic construct
  source 1..19: mol_type = other RNA
tctttttcagatgcacttc

SEQ ID NO: 8773 - RNA, 19 nt, synthetic construct
  source 1..19: mol_type = other RNA
ctctttttcagatgcactt

SEQ ID NO: 8774 - RNA, 19 nt, synthetic construct
  source 1..19: mol_type = other RNA
actctttttcagatgcact

SEQ ID NO: 8775 - RNA, 19 nt, synthetic construct
  source 1..19: mol_type = other RNA
aactctttttcagatgcac

SEQ ID NO: 8776 - RNA, 19 nt, synthetic construct
  source 1..19: mol_type = other RNA
aaactctttttcagatgca

SEQ ID NO: 8777 - RNA, 19 nt, synthetic construct
  source 1..19: mol_type = other RNA
taaactctttttcagatgc

SEQ ID NO: 8778 - RNA, 19 nt, synthetic construct
  source 1..19: mol_type = other RNA
gtaaactctttttcagatg

SEQ ID NO: 8779 - RNA, 19 nt, synthetic construct
  source 1..19: mol_type = other RNA
tgtaaactctttttcagat

SEQ ID NO: 8780 - RNA, 19 nt, synthetic construct
  source 1..19: mol_type = other RNA
ctgtaaactctttttcaga

SEQ ID NO: 8781 - RNA, 19 nt, synthetic construct
  source 1..19: mol_type = other RNA
tctgtaaactctttttcag

SEQ ID NO: 8782 - RNA, 19 nt, synthetic construct
  source 1..19: mol_type = other RNA
atctgtaaactctttttca

SEQ ID NO: 8783 - RNA, 19 nt, synthetic construct
  source 1..19: mol_type = other RNA
aatctgtaaactctttttc

SEQ ID NO: 8784 - RNA, 19 nt, synthetic construct
  source 1..19: mol_type = other RNA
taatctgtaaactcttttt

SEQ ID NO: 8785 - RNA, 19 nt, synthetic construct
  source 1..19: mol_type = other RNA
ataatctgtaaactctttt

SEQ ID NO: 8786 - RNA, 19 nt, synthetic construct
  source 1..19: mol_type = other RNA
aataatctgtaaactcttt

SEQ ID NO: 8787 - RNA, 19 nt, synthetic construct
  source 1..19: mol_type = other RNA
aaataatctgtaaactctt

SEQ ID NO: 8788 - RNA, 19 nt, synthetic construct
  source 1..19: mol_type = other RNA
caaataatctgtaaactct

SEQ ID NO: 8789 - RNA, 19 nt, synthetic construct
  source 1..19: mol_type = other RNA
acaaataatctgtaaactc

SEQ ID NO: 8790 - RNA, 19 nt, synthetic construct
  source 1..19: mol_type = other RNA
aacaaataatctgtaaact

SEQ ID NO: 8791 - RNA, 19 nt, synthetic construct
  source 1..19: mol_type = other RNA
gaacaaataatctgtaaac

SEQ ID NO: 8792 - RNA, 19 nt, synthetic construct
  source 1..19: mol_type = other RNA
tgaacaaataatctgtaaa

SEQ ID NO: 8793 - RNA, 19 nt, synthetic construct
  source 1..19: mol_type = other RNA
ttgaacaaataatctgtaa

SEQ ID NO: 8794 - RNA, 19 nt, synthetic construct
  source 1..19: mol_type = other RNA
gttgaacaaataatctgta

SEQ ID NO: 8795 - RNA, 19 nt, synthetic construct
  source 1..19: mol_type = other RNA
tgttgaacaaataatctgt

SEQ ID NO: 8796 - RNA, 19 nt, synthetic construct
  source 1..19: mol_type = other RNA
ttgttgaacaaataatctg

SEQ ID NO: 8797 - RNA, 19 nt, synthetic construct
  source 1..19: mol_type = other RNA
cttgttgaacaaataatct

SEQ ID NO: 8798 - RNA, 19 nt, synthetic construct
  source 1..19: mol_type = other RNA
acttgttgaacaaataatc

SEQ ID NO: 8799 - RNA, 19 nt, synthetic construct
  source 1..19: mol_type = other RNA
gacttgttgaacaaataat

SEQ ID NO: 8800 - RNA, 19 nt, synthetic construct
  source 1..19: mol_type = other RNA
tgacttgttgaacaaataa

SEQ ID NO: 8801 - RNA, 19 nt, synthetic construct
  source 1..19: mol_type = other RNA
gtgacttgttgaacaaata

SEQ ID NO: 8802 - RNA, 19 nt, synthetic construct
  source 1..19: mol_type = other RNA
agtgacttgttgaacaaat

SEQ ID NO: 8803 - RNA, 19 nt, synthetic construct
  source 1..19: mol_type = other RNA
tagtgacttgttgaacaaa

SEQ ID NO: 8804 - RNA, 19 nt, synthetic construct
  source 1..19: mol_type = other RNA
ctagtgacttgttgaacaa

SEQ ID NO: 8805 - RNA, 19 nt, synthetic construct
  source 1..19: mol_type = other RNA
tctagtgacttgttgaaca

SEQ ID NO: 8806 - RNA, 19 nt, synthetic construct
  source 1..19: mol_type = other RNA
ttctagtgacttgttgaac

SEQ ID NO: 8807 - RNA, 19 nt, synthetic construct
  source 1..19: mol_type = other RNA
tttctagtgacttgttgaa

SEQ ID NO: 8808 - RNA, 19 nt, synthetic construct
  source 1..19: mol_type = other RNA
atttctagtgacttgttga

SEQ ID NO: 8809 - RNA, 19 nt, synthetic construct
  source 1..19: mol_type = other RNA
aatttctagtgacttgttg

SEQ ID NO: 8810 - RNA, 19 nt, synthetic construct
  source 1..19: mol_type = other RNA
caatttctagtgacttgtt

SEQ ID NO: 8811 - RNA, 19 nt, synthetic construct
  source 1..19: mol_type = other RNA
tcaatttctagtgacttgt

SEQ ID NO: 8812 - RNA, 19 nt, synthetic construct
  source 1..19: mol_type = other RNA
ttcaatttctagtgacttg

SEQ ID NO: 8813 - RNA, 19 nt, synthetic construct
  source 1..19: mol_type = other RNA
gttcaatttctagtgactt

SEQ ID NO: 8814 - RNA, 19 nt, synthetic construct
  source 1..19: mol_type = other RNA
ggttcaatttctagtgact

SEQ ID NO: 8815 - RNA, 19 nt, synthetic construct
  source 1..19: mol_type = other RNA
aggttcaatttctagtgac

SEQ ID NO: 8816 - RNA, 19 nt, synthetic construct
  source 1..19: mol_type = other RNA
gaggttcaatttctagtga

SEQ ID NO: 8817 - RNA, 19 nt, synthetic construct
  source 1..19: mol_type = other RNA
cgaggttcaatttctagtg

SEQ ID NO: 8818 - RNA, 19 nt, synthetic construct
  source 1..19: mol_type = other RNA
tcgaggttcaatttctagt

SEQ ID NO: 8819 - RNA, 19 nt, synthetic construct
  source 1..19: mol_type = other RNA
ttcgaggttcaatttctag

SEQ ID NO: 8820 - RNA, 19 nt, synthetic construct
  source 1..19: mol_type = other RNA
tttcgaggttcaatttcta

SEQ ID NO: 8821 - RNA, 19 nt, synthetic construct
  source 1..19: mol_type = other RNA
gtttcgaggttcaatttct

SEQ ID NO: 8822 - RNA, 19 nt, synthetic construct
  source 1..19: mol_type = other RNA
agtttcgaggttcaatttc

SEQ ID NO: 8823 - RNA, 19 nt, synthetic construct
  source 1..19: mol_type = other RNA
cagtttcgaggttcaattt

SEQ ID NO: 8824 - RNA, 19 nt, synthetic construct
  source 1..19: mol_type = other RNA
gcagtttcgaggttcaatt

SEQ ID NO: 8825 - RNA, 19 nt, synthetic construct
  source 1..19: mol_type = other RNA
tgcagtttcgaggttcaat

SEQ ID NO: 8826 - RNA, 19 nt, synthetic construct
  source 1..19: mol_type = other RNA
ttgcagtttcgaggttcaa

SEQ ID NO: 8827 - RNA, 19 nt, synthetic construct
  source 1..19: mol_type = other RNA
tttgcagtttcgaggttca

SEQ ID NO: 8828 - RNA, 19 nt, synthetic construct
  source 1..19: mol_type = other RNA
gtttgcagtttcgaggttc

SEQ ID NO: 8829 - RNA, 19 nt, synthetic construct
  source 1..19: mol_type = other RNA
tgtttgcagtttcgaggtt

SEQ ID NO: 8830 - RNA, 19 nt, synthetic construct
  source 1..19: mol_type = other RNA
ctgtttgcagtttcgaggt

SEQ ID NO: 8831 - RNA, 19 nt, synthetic construct
  source 1..19: mol_type = other RNA
gctgtttgcagtttcgagg

SEQ ID NO: 8832 - RNA, 19 nt, synthetic construct
  source 1..19: mol_type = other RNA
ggctgtttgcagtttcgag

SEQ ID NO: 8833 - RNA, 19 nt, synthetic construct
  source 1..19: mol_type = other RNA
tggctgtttgcagtttcga

SEQ ID NO: 8834 - RNA, 19 nt, synthetic construct
  source 1..19: mol_type = other RNA
gtggctgtttgcagtttcg

SEQ ID NO: 8835 - RNA, 19 nt, synthetic construct
  source 1..19: mol_type = other RNA
ggtggctgtttgcagtttc

SEQ ID NO: 8836 - RNA, 19 nt, synthetic construct
  source 1..19: mol_type = other RNA
aggtggctgtttgcagttt

SEQ ID NO: 8837 - RNA, 19 nt, synthetic construct
  source 1..19: mol_type = other RNA
gaggtggctgtttgcagtt

SEQ ID NO: 8838 - RNA, 19 nt, synthetic construct
  source 1..19: mol_type = other RNA
cgaggtggctgtttgcagt

SEQ ID NO: 8839 - RNA, 19 nt, synthetic construct
  source 1..19: mol_type = other RNA
tcgaggtggctgtttgcag

SEQ ID NO: 8840 - RNA, 19 nt, synthetic construct
  source 1..19: mol_type = other RNA
atcgaggtggctgtttgca

SEQ ID NO: 8841 - RNA, 19 nt, synthetic construct
  source 1..19: mol_type = other RNA
aatcgaggtggctgtttgc

SEQ ID NO: 8842 - RNA, 19 nt, synthetic construct
  source 1..19: mol_type = other RNA
aaatcgaggtggctgtttg

SEQ ID NO: 8843 - RNA, 19 nt, synthetic construct
  source 1..19: mol_type = other RNA
gaaatcgaggtggctgttt

SEQ ID NO: 8844 - RNA, 19 nt, synthetic construct
  source 1..19: mol_type = other RNA
ggaaatcgaggtggctgtt

SEQ ID NO: 8845 - RNA, 19 nt, synthetic construct
  source 1..19: mol_type = other RNA
aggaaatcgaggtggctgt

SEQ ID NO: 8846 - RNA, 19 nt, synthetic construct
  source 1..19: mol_type = other RNA
taggaaatcgaggtggctg

SEQ ID NO: 8847 - RNA, 19 nt, synthetic construct
  source 1..19: mol_type = other RNA
ctaggaaatcgaggtggct

SEQ ID NO: 8848 - RNA, 19 nt, synthetic construct
  source 1..19: mol_type = other RNA
cctaggaaatcgaggtggc

SEQ ID NO: 8849 - RNA, 19 nt, synthetic construct
  source 1..19: mol_type = other RNA
tcctaggaaatcgaggtgg

SEQ ID NO: 8850 - RNA, 19 nt, synthetic construct
  source 1..19: mol_type = other RNA
ttcctaggaaatcgaggtg

SEQ ID NO: 8851 - RNA, 19 nt, synthetic construct
  source 1..19: mol_type = other RNA
tttcctaggaaatcgaggt

SEQ ID NO: 8852 - RNA, 19 nt, synthetic construct
  source 1..19: mol_type = other RNA
atttcctaggaaatcgagg

SEQ ID NO: 8853 - RNA, 19 nt, synthetic construct
  source 1..19: mol_type = other RNA
gatttcctaggaaatcgag

SEQ ID NO: 8854 - RNA, 19 nt, synthetic construct
  source 1..19: mol_type = other RNA
tgatttcctaggaaatcga

SEQ ID NO: 8855 - RNA, 19 nt, synthetic construct
  source 1..19: mol_type = other RNA
ttgatttcctaggaaatcg

SEQ ID NO: 8856 - RNA, 19 nt, synthetic construct
  source 1..19: mol_type = other RNA
gttgatttcctaggaaatc

SEQ ID NO: 8857 - RNA, 19 nt, synthetic construct
  source 1..19: mol_type = other RNA
agttgatttcctaggaaat

SEQ ID NO: 8858 - RNA, 19 nt, synthetic construct
  source 1..19: mol_type = other RNA
aagttgatttcctaggaaa

SEQ ID NO: 8859 - RNA, 19 nt, synthetic construct
  source 1..19: mol_type = other RNA
aaagttgatttcctaggaa

SEQ ID NO: 8860 - RNA, 19 nt, synthetic construct
  source 1..19: mol_type = other RNA
aaaagttgatttcctagga

SEQ ID NO: 8861 - RNA, 19 nt, synthetic construct
  source 1..19: mol_type = other RNA
aaaaagttgatttcctagg

SEQ ID NO: 8862 - RNA, 19 nt, synthetic construct
  source 1..19: mol_type = other RNA
gaaaaagttgatttcctag

SEQ ID NO: 8863 - RNA, 19 nt, synthetic construct
  source 1..19: mol_type = other RNA
ggaaaaagttgatttccta

SEQ ID NO: 8864 - RNA, 19 nt, synthetic construct
  source 1..19: mol_type = other RNA
aggaaaaagttgatttcct

SEQ ID NO: 8865 - RNA, 19 nt, synthetic construct
  source 1..19: mol_type = other RNA
aaggaaaaagttgatttcc

SEQ ID NO: 8866 - RNA, 19 nt, synthetic construct
  source 1..19: mol_type = other RNA
taaggaaaaagttgatttc

SEQ ID NO: 8867 - RNA, 19 nt, synthetic construct
  source 1..19: mol_type = other RNA
ttaaggaaaaagttgattt

SEQ ID NO: 8868 - RNA, 19 nt, synthetic construct
  source 1..19: mol_type = other RNA
tttaaggaaaaagttgatt

SEQ ID NO: 8869 - RNA, 19 nt, synthetic construct
  source 1..19: mol_type = other RNA
ttttaaggaaaaagttgat

SEQ ID NO: 8870 - RNA, 19 nt, synthetic construct
  source 1..19: mol_type = other RNA
attttaaggaaaaagttga

SEQ ID NO: 8871 - RNA, 19 nt, synthetic construct
  source 1..19: mol_type = other RNA
gattttaaggaaaaagttg

SEQ ID NO: 8872 - RNA, 19 nt, synthetic construct
  source 1..19: mol_type = other RNA
agattttaaggaaaaagtt

SEQ ID NO: 8873 - RNA, 19 nt, synthetic construct
  source 1..19: mol_type = other RNA
gagattttaaggaaaaagt

SEQ ID NO: 8874 - RNA, 19 nt, synthetic construct
  source 1..19: mol_type = other RNA
ggagattttaaggaaaaag

SEQ ID NO: 8875 - RNA, 19 nt, synthetic construct
  source 1..19: mol_type = other RNA
aggagattttaaggaaaaa

SEQ ID NO: 8876 - RNA, 19 nt, synthetic construct
  source 1..19: mol_type = other RNA
caggagattttaaggaaaa

SEQ ID NO: 8877 - RNA, 19 nt, synthetic construct
  source 1..19: mol_type = other RNA
ccaggagattttaaggaaa

SEQ ID NO: 8878 - RNA, 19 nt, synthetic construct
  source 1..19: mol_type = other RNA
tccaggagattttaaggaa

SEQ ID NO: 8879 - RNA, 19 nt, synthetic construct
  source 1..19: mol_type = other RNA
ttccaggagattttaagga

SEQ ID NO: 8880 - RNA, 19 nt, synthetic construct
  source 1..19: mol_type = other RNA
attccaggagattttaagg

SEQ ID NO: 8881 - RNA, 19 nt, synthetic construct
  source 1..19: mol_type = other RNA
tattccaggagattttaag

SEQ ID NO: 8882 - RNA, 19 nt, synthetic construct
  source 1..19: mol_type = other RNA
ttattccaggagattttaa

SEQ ID NO: 8883 - RNA, 19 nt, synthetic construct
  source 1..19: mol_type = other RNA
cttattccaggagatttta

SEQ ID NO: 8884 - RNA, 19 nt, synthetic construct
  source 1..19: mol_type = other RNA
ccttattccaggagatttt

SEQ ID NO: 8885 - RNA, 19 nt, synthetic construct
  source 1..19: mol_type = other RNA
gccttattccaggagattt

SEQ ID NO: 8886 - RNA, 19 nt, synthetic construct
  source 1..19: mol_type = other RNA
ggccttattccaggagatt

SEQ ID NO: 8887 - RNA, 19 nt, synthetic construct
  source 1..19: mol_type = other RNA
aggccttattccaggagat

SEQ ID NO: 8888 - RNA, 19 nt, synthetic construct
  source 1..19: mol_type = other RNA
taggccttattccaggaga

SEQ ID NO: 8889 - RNA, 19 nt, synthetic construct
  source 1..19: mol_type = other RNA
ttaggccttattccaggag

SEQ ID NO: 8890 - RNA, 19 nt, synthetic construct
  source 1..19: mol_type = other RNA
gttaggccttattccagga

SEQ ID NO: 8891 - RNA, 19 nt, synthetic construct
  source 1..19: mol_type = other RNA
tgttaggccttattccagg

SEQ ID NO: 8892 - RNA, 19 nt, synthetic construct
  source 1..19: mol_type = other RNA
gtgttaggccttattccag

SEQ ID NO: 8893 - RNA, 19 nt, synthetic construct
  source 1..19: mol_type = other RNA
tgtgttaggccttattcca

SEQ ID NO: 8894 - RNA, 19 nt, synthetic construct
  source 1..19: mol_type = other RNA
ctgtgttaggccttattcc

SEQ ID NO: 8895 - RNA, 19 nt, synthetic construct
  source 1..19: mol_type = other RNA
cctgtgttaggccttattc

SEQ ID NO: 8896 - RNA, 19 nt, synthetic construct
  source 1..19: mol_type = other RNA
gcctgtgttaggccttatt

SEQ ID NO: 8897 - RNA, 19 nt, synthetic construct
  source 1..19: mol_type = other RNA
ggcctgtgttaggccttat

SEQ ID NO: 8898 - RNA, 19 nt, synthetic construct
  source 1..19: mol_type = other RNA
cggcctgtgttaggcctta

SEQ ID NO: 8899 - RNA, 19 nt, synthetic construct
  source 1..19: mol_type = other RNA
tcggcctgtgttaggcctt

SEQ ID NO: 8900 - RNA, 19 nt, synthetic construct
  source 1..19: mol_type = other RNA
gtcggcctgtgttaggcct

SEQ ID NO: 8901 - RNA, 19 nt, synthetic construct
  source 1..19: mol_type = other RNA
tgtcggcctgtgttaggcc

SEQ ID NO: 8902 - RNA, 19 nt, synthetic construct
  source 1..19: mol_type = other RNA
atgtcggcctgtgttaggc

SEQ ID NO: 8903 - RNA, 19 nt, synthetic construct
  source 1..19: mol_type = other RNA
catgtcggcctgtgttagg

SEQ ID NO: 8904 - RNA, 19 nt, synthetic construct
  source 1..19: mol_type = other RNA
ccatgtcggcctgtgttag

SEQ ID NO: 8905 - RNA, 19 nt, synthetic construct
  source 1..19: mol_type = other RNA
gccatgtcggcctgtgtta

SEQ ID NO: 8906 - RNA, 19 nt, synthetic construct
  source 1..19: mol_type = other RNA
agccatgtcggcctgtgtt

SEQ ID NO: 8907 - RNA, 19 nt, synthetic construct
  source 1..19: mol_type = other RNA
gagccatgtcggcctgtgt

SEQ ID NO: 8908 - RNA, 19 nt, synthetic construct
  source 1..19: mol_type = other RNA
agagccatgtcggcctgtg

SEQ ID NO: 8909 - RNA, 19 nt, synthetic construct
  source 1..19: mol_type = other RNA
tagagccatgtcggcctgt

SEQ ID NO: 8910 - RNA, 19 nt, synthetic construct
  source 1..19: mol_type = other RNA
gtagagccatgtcggcctg

SEQ ID NO: 8911 - RNA, 19 nt, synthetic construct
  source 1..19: mol_type = other RNA
ggtagagccatgtcggcct

SEQ ID NO: 8912 - RNA, 19 nt, synthetic construct
  source 1..19: mol_type = other RNA
aggtagagccatgtcggcc

SEQ ID NO: 8913 - RNA, 19 nt, synthetic construct
  source 1..19: mol_type = other RNA
gaggtagagccatgtcggc

SEQ ID NO: 8914 - RNA, 19 nt, synthetic construct
  source 1..19: mol_type = other RNA
tgaggtagagccatgtcgg

SEQ ID NO: 8915 - RNA, 19 nt, synthetic construct
  source 1..19: mol_type = other RNA
ctgaggtagagccatgtcg

SEQ ID NO: 8916 - RNA, 19 nt, synthetic construct
  source 1..19: mol_type = other RNA
cctgaggtagagccatgtc

SEQ ID NO: 8917 - RNA, 19 nt, synthetic construct
  source 1..19: mol_type = other RNA
acctgaggtagagccatgt

SEQ ID NO: 8918 - RNA, 19 nt, synthetic construct
  source 1..19: mol_type = other RNA
tacctgaggtagagccatg

SEQ ID NO: 8919 - RNA, 19 nt, synthetic construct
  source 1..19: mol_type = other RNA
gtacctgaggtagagccat

SEQ ID NO: 8920 - RNA, 19 nt, synthetic construct
  source 1..19: mol_type = other RNA
agtacctgaggtagagcca

SEQ ID NO: 8921 - RNA, 19 nt, synthetic construct
  source 1..19: mol_type = other RNA
aagtacctgaggtagagcc

SEQ ID NO: 8922 - RNA, 19 nt, synthetic construct
  source 1..19: mol_type = other RNA
aaagtacctgaggtagagc

SEQ ID NO: 8923 - RNA, 19 nt, synthetic construct
  source 1..19: mol_type = other RNA
taaagtacctgaggtagag

SEQ ID NO: 8924 - RNA, 19 nt, synthetic construct
  source 1..19: mol_type = other RNA
gtaaagtacctgaggtaga

SEQ ID NO: 8925 - RNA, 19 nt, synthetic construct
  source 1..19: mol_type = other RNA
cgtaaagtacctgaggtag

SEQ ID NO: 8926 - RNA, 19 nt, synthetic construct
  source 1..19: mol_type = other RNA
tcgtaaagtacctgaggta

SEQ ID NO: 8927 - RNA, 19 nt, synthetic construct
  source 1..19: mol_type = other RNA
ctcgtaaagtacctgaggt

SEQ ID NO: 8928 - RNA, 19 nt, synthetic construct
  source 1..19: mol_type = other RNA
cctcgtaaagtacctgagg

SEQ ID NO: 8929 - RNA, 19 nt, synthetic construct
  source 1..19: mol_type = other RNA
acctcgtaaagtacctgag

SEQ ID NO: 8930 - RNA, 19 nt, synthetic construct
  source 1..19: mol_type = other RNA
gacctcgtaaagtacctga

SEQ ID NO: 8931 - RNA, 19 nt, synthetic construct
  source 1..19: mol_type = other RNA
tgacctcgtaaagtacctg

SEQ ID NO: 8932 - RNA, 19 nt, synthetic construct
  source 1..19: mol_type = other RNA
gtgacctcgtaaagtacct

SEQ ID NO: 8933 - RNA, 19 nt, synthetic construct
  source 1..19: mol_type = other RNA
ggtgacctcgtaaagtacc

SEQ ID NO: 8934 - RNA, 19 nt, synthetic construct
  source 1..19: mol_type = other RNA
gggtgacctcgtaaagtac

SEQ ID NO: 8935 - RNA, 19 nt, synthetic construct
  source 1..19: mol_type = other RNA
tgggtgacctcgtaaagta

SEQ ID NO: 8936 - RNA, 19 nt, synthetic construct
  source 1..19: mol_type = other RNA
ttgggtgacctcgtaaagt

SEQ ID NO: 8937 - RNA, 19 nt, synthetic construct
  source 1..19: mol_type = other RNA
gttgggtgacctcgtaaag

SEQ ID NO: 8938 - RNA, 19 nt, synthetic construct
  source 1..19: mol_type = other RNA
tgttgggtgacctcgtaaa

SEQ ID NO: 8939 - RNA, 19 nt, synthetic construct
  source 1..19: mol_type = other RNA
gtgttgggtgacctcgtaa

SEQ ID NO: 8940 - RNA, 19 nt, synthetic construct
  source 1..19: mol_type = other RNA
ggtgttgggtgacctcgta

SEQ ID NO: 8941 - RNA, 19 nt, synthetic construct
  source 1..19: mol_type = other RNA
tggtgttgggtgacctcgt

SEQ ID NO: 8942 - RNA, 19 nt, synthetic construct
  source 1..19: mol_type = other RNA
atggtgttgggtgacctcg

SEQ ID NO: 8943 - RNA, 19 nt, synthetic construct
  source 1..19: mol_type = other RNA
aatggtgttgggtgacctc

SEQ ID NO: 8944 - RNA, 19 nt, synthetic construct
  source 1..19: mol_type = other RNA
taatggtgttgggtgacct

SEQ ID NO: 8945 - RNA, 19 nt, synthetic construct
  source 1..19: mol_type = other RNA
ctaatggtgttgggtgacc

SEQ ID NO: 8946 - RNA, 19 nt, synthetic construct
  source 1..19: mol_type = other RNA
tctaatggtgttgggtgac

SEQ ID NO: 8947 - RNA, 19 nt, synthetic construct
  source 1..19: mol_type = other RNA
ttctaatggtgttgggtga

SEQ ID NO: 8948 - RNA, 19 nt, synthetic construct
  source 1..19: mol_type = other RNA
tttctaatggtgttgggtg

SEQ ID NO: 8949 - RNA, 19 nt, synthetic construct
  source 1..19: mol_type = other RNA
ctttctaatggtgttgggt

SEQ ID NO: 8950 - RNA, 19 nt, synthetic construct
  source 1..19: mol_type = other RNA
tctttctaatggtgttggg

SEQ ID NO: 8951 - RNA, 19 nt, synthetic construct
  source 1..19: mol_type = other RNA
ctctttctaatggtgttgg

SEQ ID NO: 8952 - RNA, 19 nt, synthetic construct
  source 1..19: mol_type = other RNA
tctctttctaatggtgttg

SEQ ID NO: 8953 - RNA, 19 nt, synthetic construct
  source 1..19: mol_type = other RNA
ttctctttctaatggtgtt

SEQ ID NO: 8954 - RNA, 19 nt, synthetic construct
  source 1..19: mol_type = other RNA
gttctctttctaatggtgt

SEQ ID NO: 8955 - RNA, 19 nt, synthetic construct
  source 1..19: mol_type = other RNA
ggttctctttctaatggtg

SEQ ID NO: 8956 - RNA, 19 nt, synthetic construct
  source 1..19: mol_type = other RNA
tggttctctttctaatggt

SEQ ID NO: 8957 - RNA, 19 nt, synthetic construct
  source 1..19: mol_type = other RNA
atggttctctttctaatgg

SEQ ID NO: 8958 - RNA, 19 nt, synthetic construct
  source 1..19: mol_type = other RNA
catggttctctttctaatg

SEQ ID NO: 8959 - RNA, 19 nt, synthetic construct
  source 1..19: mol_type = other RNA
acatggttctctttctaat

SEQ ID NO: 8960 - RNA, 19 nt, synthetic construct
  source 1..19: mol_type = other RNA
tacatggttctctttctaa

SEQ ID NO: 8961 - RNA, 19 nt, synthetic construct
  source 1..19: mol_type = other RNA
ttacatggttctctttcta

SEQ ID NO: 8962 - RNA, 19 nt, synthetic construct
  source 1..19: mol_type = other RNA
tttacatggttctctttct

SEQ ID NO: 8963 - RNA, 19 nt, synthetic construct
  source 1..19: mol_type = other RNA
ttttacatggttctctttc

SEQ ID NO: 8964 - RNA, 19 nt, synthetic construct
  source 1..19: mol_type = other RNA
attttacatggttctcttt

SEQ ID NO: 8965 - RNA, 19 nt, synthetic construct
  source 1..19: mol_type = other RNA
tattttacatggttctctt

SEQ ID NO: 8966 - RNA, 19 nt, synthetic construct
  source 1..19: mol_type = other RNA
ttattttacatggttctct

SEQ ID NO: 8967 - RNA, 19 nt, synthetic construct
  source 1..19: mol_type = other RNA
cttattttacatggttctc

SEQ ID NO: 8968 - RNA, 19 nt, synthetic construct
  source 1..19: mol_type = other RNA
gcttattttacatggttct

SEQ ID NO: 8969 - RNA, 19 nt, synthetic construct
  source 1..19: mol_type = other RNA
agcttattttacatggttc

SEQ ID NO: 8970 - RNA, 19 nt, synthetic construct
  source 1..19: mol_type = other RNA
aagcttattttacatggtt

SEQ ID NO: 8971 - RNA, 19 nt, synthetic construct
  source 1..19: mol_type = other RNA
aaagcttattttacatggt

SEQ ID NO: 8972 - RNA, 19 nt, synthetic construct
  source 1..19: mol_type = other RNA
taaagcttattttacatgg

SEQ ID NO: 8973 - RNA, 19 nt, synthetic construct
  source 1..19: mol_type = other RNA
ctaaagcttattttacatg

SEQ ID NO: 8974 - RNA, 19 nt, synthetic construct
  source 1..19: mol_type = other RNA
actaaagcttattttacat

SEQ ID NO: 8975 - RNA, 19 nt, synthetic construct
  source 1..19: mol_type = other RNA
gactaaagcttattttaca

SEQ ID NO: 8976 - RNA, 19 nt, synthetic construct
  source 1..19: mol_type = other RNA
cgactaaagcttattttac

SEQ ID NO: 8977 - RNA, 19 nt, synthetic construct
  source 1..19: mol_type = other RNA
ccgactaaagcttatttta

SEQ ID NO: 8978 - RNA, 19 nt, synthetic construct
  source 1..19: mol_type = other RNA
tccgactaaagcttatttt

SEQ ID NO: 8979 - RNA, 19 nt, synthetic construct
  source 1..19: mol_type = other RNA
atccgactaaagcttattt

SEQ ID NO: 8980 - RNA, 19 nt, synthetic construct
  source 1..19: mol_type = other RNA
aatccgactaaagcttatt

SEQ ID NO: 8981 - RNA, 19 nt, synthetic construct
  source 1..19: mol_type = other RNA
caatccgactaaagcttat

SEQ ID NO: 8982 - RNA, 19 nt, synthetic construct
  source 1..19: mol_type = other RNA
gcaatccgactaaagctta

SEQ ID NO: 8983 - RNA, 19 nt, synthetic construct
  source 1..19: mol_type = other RNA
agcaatccgactaaagctt

SEQ ID NO: 8984 - RNA, 19 nt, synthetic construct
  source 1..19: mol_type = other RNA
cagcaatccgactaaagct

SEQ ID NO: 8985 - RNA, 19 nt, synthetic construct
  source 1..19: mol_type = other RNA
tcagcaatccgactaaagc

SEQ ID NO: 8986 - RNA, 19 nt, synthetic construct
  source 1..19: mol_type = other RNA
ttcagcaatccgactaaag

SEQ ID NO: 8987 - RNA, 19 nt, synthetic construct
  source 1..19: mol_type = other RNA
tttcagcaatccgactaaa

SEQ ID NO: 8988 - RNA, 19 nt, synthetic construct
  source 1..19: mol_type = other RNA
gtttcagcaatccgactaa

SEQ ID NO: 8989 - RNA, 19 nt, synthetic construct
  source 1..19: mol_type = other RNA
agtttcagcaatccgacta

SEQ ID NO: 8990 - RNA, 19 nt, synthetic construct
  source 1..19: mol_type = other RNA
cagtttcagcaatccgact

SEQ ID NO: 8991 - RNA, 19 nt, synthetic construct
  source 1..19: mol_type = other RNA
tcagtttcagcaatccgac

SEQ ID NO: 8992 - RNA, 19 nt, synthetic construct
  source 1..19: mol_type = other RNA
ctcagtttcagcaatccga

SEQ ID NO: 8993 - RNA, 19 nt, synthetic construct
  source 1..19: mol_type = other RNA
gctcagtttcagcaatccg

SEQ ID NO: 8994 - RNA, 19 nt, synthetic construct
  source 1..19: mol_type = other RNA
agctcagtttcagcaatcc

SEQ ID NO: 8995 - RNA, 19 nt, synthetic construct
  source 1..19: mol_type = other RNA
cagctcagtttcagcaatc

SEQ ID NO: 8996 - RNA, 19 nt, synthetic construct
  source 1..19: mol_type = other RNA
ccagctcagtttcagcaat

SEQ ID NO: 8997 - RNA, 19 nt, synthetic construct
  source 1..19: mol_type = other RNA
tccagctcagtttcagcaa

SEQ ID NO: 8998 - RNA, 19 nt, synthetic construct
  source 1..19: mol_type = other RNA
ttccagctcagtttcagca

SEQ ID NO: 8999 - RNA, 19 nt, synthetic construct
  source 1..19: mol_type = other RNA
attccagctcagtttcagc

SEQ ID NO: 9000 - RNA, 19 nt, synthetic construct
  source 1..19: mol_type = other RNA
gattccagctcagtttcag

SEQ ID NO: 9001 - RNA, 19 nt, synthetic construct
  source 1..19: mol_type = other RNA
tgattccagctcagtttca

SEQ ID NO: 9002 - RNA, 19 nt, synthetic construct
  source 1..19: mol_type = other RNA
ttgattccagctcagtttc

SEQ ID NO: 9003 - RNA, 19 nt, synthetic construct
  source 1..19: mol_type = other RNA
gttgattccagctcagttt

SEQ ID NO: 9004 - RNA, 19 nt, synthetic construct
  source 1..19: mol_type = other RNA
tgttgattccagctcagtt

SEQ ID NO: 9005 - RNA, 19 nt, synthetic construct
  source 1..19: mol_type = other RNA
ctgttgattccagctcagt

SEQ ID NO: 9006 - RNA, 19 nt, synthetic construct
  source 1..19: mol_type = other RNA
actgttgattccagctcag

SEQ ID NO: 9007 - RNA, 19 nt, synthetic construct
  source 1..19: mol_type = other RNA
cactgttgattccagctca

SEQ ID NO: 9008 - RNA, 19 nt, synthetic construct
  source 1..19: mol_type = other RNA
acactgttgattccagctc

SEQ ID NO: 9009 - RNA, 19 nt, synthetic construct
  source 1..19: mol_type = other RNA
gacactgttgattccagct

SEQ ID NO: 9010 - RNA, 19 nt, synthetic construct
  source 1..19: mol_type = other RNA
tgacactgttgattccagc

SEQ ID NO: 9011 - RNA, 19 nt, synthetic construct
  source 1..19: mol_type = other RNA
ctgacactgttgattccag

SEQ ID NO: 9012 - RNA, 19 nt, synthetic construct
  source 1..19: mol_type = other RNA
gctgacactgttgattcca

SEQ ID NO: 9013 - RNA, 19 nt, synthetic construct
  source 1..19: mol_type = other RNA
tgctgacactgttgattcc

SEQ ID NO: 9014 - RNA, 19 nt, synthetic construct
  source 1..19: mol_type = other RNA
gtgctgacactgttgattc

SEQ ID NO: 9015 - RNA, 19 nt, synthetic construct
  source 1..19: mol_type = other RNA
ggtgctgacactgttgatt

SEQ ID NO: 9016 - RNA, 19 nt, synthetic construct
  source 1..19: mol_type = other RNA
tggtgctgacactgttgat

SEQ ID NO: 9017 - RNA, 19 nt, synthetic construct
  source 1..19: mol_type = other RNA
ttggtgctgacactgttga

SEQ ID NO: 9018 - RNA, 19 nt, synthetic construct
  source 1..19: mol_type = other RNA
gttggtgctgacactgttg

SEQ ID NO: 9019 - RNA, 19 nt, synthetic construct
  source 1..19: mol_type = other RNA
ggttggtgctgacactgtt

SEQ ID NO: 9020 - RNA, 19 nt, synthetic construct
  source 1..19: mol_type = other RNA
aggttggtgctgacactgt

SEQ ID NO: 9021 - RNA, 19 nt, synthetic construct
  source 1..19: mol_type = other RNA
gaggttggtgctgacactg

SEQ ID NO: 9022 - RNA, 19 nt, synthetic construct
  source 1..19: mol_type = other RNA
agaggttggtgctgacact

SEQ ID NO: 9023 - RNA, 19 nt, synthetic construct
  source 1..19: mol_type = other RNA
gagaggttggtgctgacac

SEQ ID NO: 9024 - RNA, 19 nt, synthetic construct
  source 1..19: mol_type = other RNA
ggagaggttggtgctgaca

SEQ ID NO: 9025 - RNA, 19 nt, synthetic construct
  source 1..19: mol_type = other RNA
tggagaggttggtgctgac

SEQ ID NO: 9026 - RNA, 19 nt, synthetic construct
  source 1..19: mol_type = other RNA
ttggagaggttggtgctga

SEQ ID NO: 9027 - RNA, 19 nt, synthetic construct
  source 1..19: mol_type = other RNA
tttggagaggttggtgctg

SEQ ID NO: 9028 - RNA, 19 nt, synthetic construct
  source 1..19: mol_type = other RNA
atttggagaggttggtgct

SEQ ID NO: 9029 - RNA, 19 nt, synthetic construct
  source 1..19: mol_type = other RNA
tatttggagaggttggtgc

SEQ ID NO: 9030 - RNA, 19 nt, synthetic construct
  source 1..19: mol_type = other RNA
gtatttggagaggttggtg

SEQ ID NO: 9031 - RNA, 19 nt, synthetic construct
  source 1..19: mol_type = other RNA
tgtatttggagaggttggt

SEQ ID NO: 9032 - RNA, 19 nt, synthetic construct
  source 1..19: mol_type = other RNA
gtgtatttggagaggttgg

SEQ ID NO: 9033 - RNA, 19 nt, synthetic construct
  source 1..19: mol_type = other RNA
ggtgtatttggagaggttg

SEQ ID NO: 9034 - RNA, 19 nt, synthetic construct
  source 1..19: mol_type = other RNA
tggtgtatttggagaggtt

SEQ ID NO: 9035 - RNA, 19 nt, synthetic construct
  source 1..19: mol_type = other RNA
atggtgtatttggagaggt

SEQ ID NO: 9036 - RNA, 19 nt, synthetic construct
  source 1..19: mol_type = other RNA
gatggtgtatttggagagg

SEQ ID NO: 9037 - RNA, 19 nt, synthetic construct
  source 1..19: mol_type = other RNA
agatggtgtatttggagag

SEQ ID NO: 9038 - RNA, 19 nt, synthetic construct
  source 1..19: mol_type = other RNA
tagatggtgtatttggaga

SEQ ID NO: 9039 - RNA, 19 nt, synthetic construct
  source 1..19: mol_type = other RNA
gtagatggtgtatttggag

SEQ ID NO: 9040 - RNA, 19 nt, synthetic construct
  source 1..19: mol_type = other RNA
agtagatggtgtatttgga

SEQ ID NO: 9041 - RNA, 19 nt, synthetic construct
  source 1..19: mol_type = other RNA
gagtagatggtgtatttgg

SEQ ID NO: 9042 - RNA, 19 nt, synthetic construct
  source 1..19: mol_type = other RNA
ggagtagatggtgtatttg

SEQ ID NO: 9043 - RNA, 19 nt, synthetic construct
  source 1..19: mol_type = other RNA
tggagtagatggtgtattt

SEQ ID NO: 9044 - RNA, 19 nt, synthetic construct
  source 1..19: mol_type = other RNA
gtggagtagatggtgtatt

SEQ ID NO: 9045 - RNA, 19 nt, synthetic construct
  source 1..19: mol_type = other RNA
ggtggagtagatggtgtat

SEQ ID NO: 9046 - RNA, 19 nt, synthetic construct
  source 1..19: mol_type = other RNA
tggtggagtagatggtgta

SEQ ID NO: 9047 - RNA, 19 nt, synthetic construct
  source 1..19: mol_type = other RNA
ctggtggagtagatggtgt

SEQ ID NO: 9048 - RNA, 19 nt, synthetic construct
  source 1..19: mol_type = other RNA
actggtggagtagatggtg

SEQ ID NO: 9049 - RNA, 19 nt, synthetic construct
  source 1..19: mol_type = other RNA
tactggtggagtagatggt

SEQ ID NO: 9050 - RNA, 19 nt, synthetic construct
  source 1..19: mol_type = other RNA
atactggtggagtagatgg

SEQ ID NO: 9051 - RNA, 19 nt, synthetic construct
  source 1..19: mol_type = other RNA
gatactggtggagtagatg

SEQ ID NO: 9052 - RNA, 19 nt, synthetic construct
  source 1..19: mol_type = other RNA
agatactggtggagtagat

SEQ ID NO: 9053 - RNA, 19 nt, synthetic construct
  source 1..19: mol_type = other RNA
cagatactggtggagtaga

SEQ ID NO: 9054 - RNA, 19 nt, synthetic construct
  source 1..19: mol_type = other RNA
gcagatactggtggagtag

SEQ ID NO: 9055 - RNA, 19 nt, synthetic construct
  source 1..19: mol_type = other RNA
agcagatactggtggagta

SEQ ID NO: 9056 - RNA, 19 nt, synthetic construct
  source 1..19: mol_type = other RNA
aagcagatactggtggagt

SEQ ID NO: 9057 - RNA, 19 nt, synthetic construct
  source 1..19: mol_type = other RNA
gaagcagatactggtggag

SEQ ID NO: 9058 - RNA, 19 nt, synthetic construct
  source 1..19: mol_type = other RNA
agaagcagatactggtgga

SEQ ID NO: 9059 - RNA, 19 nt, synthetic construct
  source 1..19: mol_type = other RNA
aagaagcagatactggtgg

SEQ ID NO: 9060 - RNA, 19 nt, synthetic construct
  source 1..19: mol_type = other RNA
gaagaagcagatactggtg

SEQ ID NO: 9061 - RNA, 19 nt, synthetic construct
  source 1..19: mol_type = other RNA
tgaagaagcagatactggt

SEQ ID NO: 9062 - RNA, 19 nt, synthetic construct
  source 1..19: mol_type = other RNA
ctgaagaagcagatactgg

SEQ ID NO: 9063 - RNA, 19 nt, synthetic construct
  source 1..19: mol_type = other RNA
tctgaagaagcagatactg

SEQ ID NO: 9064 - RNA, 19 nt, synthetic construct
  source 1..19: mol_type = other RNA
gtctgaagaagcagatact

SEQ ID NO: 9065 - RNA, 19 nt, synthetic construct
  source 1..19: mol_type = other RNA
ggtctgaagaagcagatac

SEQ ID NO: 9066 - RNA, 19 nt, synthetic construct
  source 1..19: mol_type = other RNA
aggtctgaagaagcagata

SEQ ID NO: 9067 - RNA, 19 nt, synthetic construct
  source 1..19: mol_type = other RNA
aaggtctgaagaagcagat

SEQ ID NO: 9068 - RNA, 19 nt, synthetic construct
  source 1..19: mol_type = other RNA
taaggtctgaagaagcaga

SEQ ID NO: 9069 - RNA, 19 nt, synthetic construct
  source 1..19: mol_type = other RNA
ctaaggtctgaagaagcag

SEQ ID NO: 9070 - RNA, 19 nt, synthetic construct
  source 1..19: mol_type = other RNA
actaaggtctgaagaagca

SEQ ID NO: 9071 - RNA, 19 nt, synthetic construct
  source 1..19: mol_type = other RNA
cactaaggtctgaagaagc

SEQ ID NO: 9072 - RNA, 19 nt, synthetic construct
  source 1..19: mol_type = other RNA
acactaaggtctgaagaag

SEQ ID NO: 9073 - RNA, 19 nt, synthetic construct
  source 1..19: mol_type = other RNA
tacactaaggtctgaagaa

SEQ ID NO: 9074 - RNA, 19 nt, synthetic construct
  source 1..19: mol_type = other RNA
atacactaaggtctgaaga

SEQ ID NO: 9075 - RNA, 19 nt, synthetic construct
  source 1..19: mol_type = other RNA
aatacactaaggtctgaag

SEQ ID NO: 9076 - RNA, 19 nt, synthetic construct
  source 1..19: mol_type = other RNA
aaatacactaaggtctgaa

SEQ ID NO: 9077 - RNA, 19 nt, synthetic construct
  source 1..19: mol_type = other RNA
aaaatacactaaggtctga

SEQ ID NO: 9078 - RNA, 19 nt, synthetic construct
  source 1..19: mol_type = other RNA
aaaaatacactaaggtctg

SEQ ID NO: 9079 - RNA, 19 nt, synthetic construct
  source 1..19: mol_type = other RNA
taaaaatacactaaggtct

SEQ ID NO: 9080 - RNA, 19 nt, synthetic construct
  source 1..19: mol_type = other RNA
ctaaaaatacactaaggtc

SEQ ID NO: 9081 - RNA, 19 nt, synthetic construct
  source 1..19: mol_type = other RNA
tctaaaaatacactaaggt

SEQ ID NO: 9082 - RNA, 19 nt, synthetic construct
  source 1..19: mol_type = other RNA
atctaaaaatacactaagg

SEQ ID NO: 9083 - RNA, 19 nt, synthetic construct
  source 1..19: mol_type = other RNA
catctaaaaatacactaag

SEQ ID NO: 9084 - RNA, 19 nt, synthetic construct
  source 1..19: mol_type = other RNA
acatctaaaaatacactaa

SEQ ID NO: 9085 - RNA, 19 nt, synthetic construct
  source 1..19: mol_type = other RNA
cacatctaaaaatacacta

SEQ ID NO: 9086 - RNA, 19 nt, synthetic construct
  source 1..19: mol_type = other RNA
ccacatctaaaaatacact

SEQ ID NO: 9087 - RNA, 19 nt, synthetic construct
  source 1..19: mol_type = other RNA
tccacatctaaaaatacac

SEQ ID NO: 9088 - RNA, 19 nt, synthetic construct
  source 1..19: mol_type = other RNA
atccacatctaaaaataca

SEQ ID NO: 9089 - RNA, 19 nt, synthetic construct
  source 1..19: mol_type = other RNA
gatccacatctaaaaatac

SEQ ID NO: 9090 - RNA, 19 nt, synthetic construct
  source 1..19: mol_type = other RNA
agatccacatctaaaaata

SEQ ID NO: 9091 - RNA, 19 nt, synthetic construct
  source 1..19: mol_type = other RNA
gagatccacatctaaaaat

SEQ ID NO: 9092 - RNA, 19 nt, synthetic construct
  source 1..19: mol_type = other RNA
tgagatccacatctaaaaa

SEQ ID NO: 9093 - RNA, 19 nt, synthetic construct
  source 1..19: mol_type = other RNA
ttgagatccacatctaaaa

SEQ ID NO: 9094 - RNA, 19 nt, synthetic construct
  source 1..19: mol_type = other RNA
gttgagatccacatctaaa

SEQ ID NO: 9095 - RNA, 19 nt, synthetic construct
  source 1..19: mol_type = other RNA
tgttgagatccacatctaa

SEQ ID NO: 9096 - RNA, 19 nt, synthetic construct
  source 1..19: mol_type = other RNA
ctgttgagatccacatcta

SEQ ID NO: 9097 - RNA, 19 nt, synthetic construct
  source 1..19: mol_type = other RNA
gctgttgagatccacatct

SEQ ID NO: 9098 - RNA, 19 nt, synthetic construct
  source 1..19: mol_type = other RNA
agctgttgagatccacatc

SEQ ID NO: 9099 - RNA, 19 nt, synthetic construct
  source 1..19: mol_type = other RNA
gagctgttgagatccacat

SEQ ID NO: 9100 - RNA, 19 nt, synthetic construct
  source 1..19: mol_type = other RNA
ggagctgttgagatccaca

SEQ ID NO: 9101 - RNA, 19 nt, synthetic construct
  source 1..19: mol_type = other RNA
aggagctgttgagatccac

SEQ ID NO: 9102 - RNA, 19 nt, synthetic construct
  source 1..19: mol_type = other RNA
caggagctgttgagatcca

SEQ ID NO: 9103 - RNA, 19 nt, synthetic construct
  source 1..19: mol_type = other RNA
acaggagctgttgagatcc

SEQ ID NO: 9104 - RNA, 19 nt, synthetic construct
  source 1..19: mol_type = other RNA
cacaggagctgttgagatc

SEQ ID NO: 9105 - RNA, 19 nt, synthetic construct
  source 1..19: mol_type = other RNA
ccacaggagctgttgagat

SEQ ID NO: 9106 - RNA, 19 nt, synthetic construct
  source 1..19: mol_type = other RNA
gccacaggagctgttgaga

SEQ ID NO: 9107 - RNA, 19 nt, synthetic construct
  source 1..19: mol_type = other RNA
tgccacaggagctgttgag

SEQ ID NO: 9108 - RNA, 19 nt, synthetic construct
  source 1..19: mol_type = other RNA
ctgccacaggagctgttga

SEQ ID NO: 9109 - RNA, 19 nt, synthetic construct
  source 1..19: mol_type = other RNA
gctgccacaggagctgttg

SEQ ID NO: 9110 - RNA, 19 nt, synthetic construct
  source 1..19: mol_type = other RNA
tgctgccacaggagctgtt

SEQ ID NO: 9111 - RNA, 19 nt, synthetic construct
  source 1..19: mol_type = other RNA
ttgctgccacaggagctgt

SEQ ID NO: 9112 - RNA, 19 nt, synthetic construct
  source 1..19: mol_type = other RNA
attgctgccacaggagctg

SEQ ID NO: 9113 - RNA, 19 nt, synthetic construct
  source 1..19: mol_type = other RNA
tattgctgccacaggagct

SEQ ID NO: 9114 - RNA, 19 nt, synthetic construct
  source 1..19: mol_type = other RNA
ctattgctgccacaggagc

SEQ ID NO: 9115 - RNA, 19 nt, synthetic construct
  source 1..19: mol_type = other RNA
gctattgctgccacaggag

SEQ ID NO: 9116 - RNA, 19 nt, synthetic construct
  source 1..19: mol_type = other RNA
tgctattgctgccacagga

SEQ ID NO: 9117 - RNA, 19 nt, synthetic construct
  source 1..19: mol_type = other RNA
atgctattgctgccacagg

SEQ ID NO: 9118 - RNA, 19 nt, synthetic construct
  source 1..19: mol_type = other RNA
gatgctattgctgccacag

SEQ ID NO: 9119 - RNA, 19 nt, synthetic construct
  source 1..19: mol_type = other RNA
agatgctattgctgccaca

SEQ ID NO: 9120 - RNA, 19 nt, synthetic construct
  source 1..19: mol_type = other RNA
aagatgctattgctgccac

SEQ ID NO: 9121 - RNA, 19 nt, synthetic construct
  source 1..19: mol_type = other RNA
aaagatgctattgctgcca

SEQ ID NO: 9122 - RNA, 19 nt, synthetic construct
  source 1..19: mol_type = other RNA
caaagatgctattgctgcc

SEQ ID NO: 9123 - RNA, 19 nt, synthetic construct
  source 1..19: mol_type = other RNA
gcaaagatgctattgctgc

SEQ ID NO: 9124 - RNA, 19 nt, synthetic construct
  source 1..19: mol_type = other RNA
agcaaagatgctattgctg

SEQ ID NO: 9125 - RNA, 19 nt, synthetic construct
  source 1..19: mol_type = other RNA
gagcaaagatgctattgct

SEQ ID NO: 9126 - RNA, 19 nt, synthetic construct
  source 1..19: mol_type = other RNA
ggagcaaagatgctattgc

SEQ ID NO: 9127 - RNA, 19 nt, synthetic construct
  source 1..19: mol_type = other RNA
tggagcaaagatgctattg

SEQ ID NO: 9128 - RNA, 19 nt, synthetic construct
  source 1..19: mol_type = other RNA
ctggagcaaagatgctatt

SEQ ID NO: 9129 - RNA, 19 nt, synthetic construct
  source 1..19: mol_type = other RNA
actggagcaaagatgctat

SEQ ID NO: 9130 - RNA, 19 nt, synthetic construct
  source 1..19: mol_type = other RNA
cactggagcaaagatgcta

SEQ ID NO: 9131 - RNA, 19 nt, synthetic construct
  source 1..19: mol_type = other RNA
gcactggagcaaagatgct

SEQ ID NO: 9132 - RNA, 19 nt, synthetic construct
  source 1..19: mol_type = other RNA
agcactggagcaaagatgc

SEQ ID NO: 9133 - RNA, 19 nt, synthetic construct
  source 1..19: mol_type = other RNA
aagcactggagcaaagatg

SEQ ID NO: 9134 - RNA, 19 nt, synthetic construct
  source 1..19: mol_type = other RNA
aaagcactggagcaaagat

SEQ ID NO: 9135 - RNA, 19 nt, synthetic construct
  source 1..19: mol_type = other RNA
aaaagcactggagcaaaga

SEQ ID NO: 9136 - RNA, 19 nt, synthetic construct
  source 1..19: mol_type = other RNA
caaaagcactggagcaaag

SEQ ID NO: 9137 - RNA, 19 nt, synthetic construct
  source 1..19: mol_type = other RNA
gcaaaagcactggagcaaa

SEQ ID NO: 9138 - RNA, 19 nt, synthetic construct
  source 1..19: mol_type = other RNA
ggcaaaagcactggagcaa

SEQ ID NO: 9139 - RNA, 19 nt, synthetic construct
  source 1..19: mol_type = other RNA
tggcaaaagcactggagca

SEQ ID NO: 9140 - RNA, 19 nt, synthetic construct
  source 1..19: mol_type = other RNA
gtggcaaaagcactggagc

SEQ ID NO: 9141 - RNA, 19 nt, synthetic construct
  source 1..19: mol_type = other RNA
tgtggcaaaagcactggag

SEQ ID NO: 9142 - RNA, 19 nt, synthetic construct
  source 1..19: mol_type = other RNA
atgtggcaaaagcactgga

SEQ ID NO: 9143 - RNA, 19 nt, synthetic construct
  source 1..19: mol_type = other RNA
aatgtggcaaaagcactgg

SEQ ID NO: 9144 - RNA, 19 nt, synthetic construct
  source 1..19: mol_type = other RNA
gaatgtggcaaaagcactg

SEQ ID NO: 9145 - RNA, 19 nt, synthetic construct
  source 1..19: mol_type = other RNA
tgaatgtggcaaaagcact

SEQ ID NO: 9146 - RNA, 19 nt, synthetic construct
  source 1..19: mol_type = other RNA
ttgaatgtggcaaaagcac

SEQ ID NO: 9147 - RNA, 19 nt, synthetic construct
  source 1..19: mol_type = other RNA
tttgaatgtggcaaaagca

SEQ ID NO: 9148 - RNA, 19 nt, synthetic construct
  source 1..19: mol_type = other RNA
ctttgaatgtggcaaaagc

SEQ ID NO: 9149 - RNA, 19 nt, synthetic construct
  source 1..19: mol_type = other RNA
actttgaatgtggcaaaag

SEQ ID NO: 9150 - RNA, 19 nt, synthetic construct
  source 1..19: mol_type = other RNA
gactttgaatgtggcaaaa

SEQ ID NO: 9151 - RNA, 19 nt, synthetic construct
  source 1..19: mol_type = other RNA
agactttgaatgtggcaaa

SEQ ID NO: 9152 - RNA, 19 nt, synthetic construct
  source 1..19: mol_type = other RNA
aagactttgaatgtggcaa

SEQ ID NO: 9153 - RNA, 19 nt, synthetic construct
  source 1..19: mol_type = other RNA
aaagactttgaatgtggca

SEQ ID NO: 9154 - RNA, 19 nt, synthetic construct
  source 1..19: mol_type = other RNA
gaaagactttgaatgtggc

SEQ ID NO: 9155 - RNA, 19 nt, synthetic construct
  source 1..19: mol_type = other RNA
agaaagactttgaatgtgg

SEQ ID NO: 9156 - RNA, 19 nt, synthetic construct
  source 1..19: mol_type = other RNA
aagaaagactttgaatgtg

SEQ ID NO: 9157 - RNA, 19 nt, synthetic construct
  source 1..19: mol_type = other RNA
aaagaaagactttgaatgt

SEQ ID NO: 9158 - RNA, 19 nt, synthetic construct
  source 1..19: mol_type = other RNA
taaagaaagactttgaatg

SEQ ID NO: 9159 - RNA, 19 nt, synthetic construct
  source 1..19: mol_type = other RNA
ctaaagaaagactttgaat

SEQ ID NO: 9160 - RNA, 19 nt, synthetic construct
  source 1..19: mol_type = other RNA
actaaagaaagactttgaa

SEQ ID NO: 9161 - RNA, 19 nt, synthetic construct
  source 1..19: mol_type = other RNA
aactaaagaaagactttga

SEQ ID NO: 9162 - RNA, 19 nt, synthetic construct
  source 1..19: mol_type = other RNA
gaactaaagaaagactttg

SEQ ID NO: 9163 - RNA, 19 nt, synthetic construct
  source 1..19: mol_type = other RNA
tgaactaaagaaagacttt

SEQ ID NO: 9164 - RNA, 19 nt, synthetic construct
  source 1..19: mol_type = other RNA
atgaactaaagaaagactt

SEQ ID NO: 9165 - RNA, 19 nt, synthetic construct
  source 1..19: mol_type = other RNA
catgaactaaagaaagact

SEQ ID NO: 9166 - RNA, 19 nt, synthetic construct
  source 1..19: mol_type = other RNA
acatgaactaaagaaagac

SEQ ID NO: 9167 - RNA, 19 nt, synthetic construct
  source 1..19: mol_type = other RNA
cacatgaactaaagaaaga

SEQ ID NO: 9168 - RNA, 19 nt, synthetic construct
  source 1..19: mol_type = other RNA
ccacatgaactaaagaaag

SEQ ID NO: 9169 - RNA, 19 nt, synthetic construct
  source 1..19: mol_type = other RNA
accacatgaactaaagaaa

SEQ ID NO: 9170 - RNA, 19 nt, synthetic construct
  source 1..19: mol_type = other RNA
taccacatgaactaaagaa

SEQ ID NO: 9171 - RNA, 19 nt, synthetic construct
  source 1..19: mol_type = other RNA
ctaccacatgaactaaaga

SEQ ID NO: 9172 - RNA, 19 nt, synthetic construct
  source 1..19: mol_type = other RNA
actaccacatgaactaaag

SEQ ID NO: 9173 - RNA, 19 nt, synthetic construct
  source 1..19: mol_type = other RNA
aactaccacatgaactaaa

SEQ ID NO: 9174 - RNA, 19 nt, synthetic construct
  source 1..19: mol_type = other RNA
aaactaccacatgaactaa

SEQ ID NO: 9175 - RNA, 19 nt, synthetic construct
  source 1..19: mol_type = other RNA
taaactaccacatgaacta

SEQ ID NO: 9176 - RNA, 19 nt, synthetic construct
  source 1..19: mol_type = other RNA
gtaaactaccacatgaact

SEQ ID NO: 9177 - RNA, 19 nt, synthetic construct
  source 1..19: mol_type = other RNA
tgtaaactaccacatgaac

SEQ ID NO: 9178 - RNA, 19 nt, synthetic construct
  source 1..19: mol_type = other RNA
atgtaaactaccacatgaa

SEQ ID NO: 9179 - RNA, 19 nt, synthetic construct
  source 1..19: mol_type = other RNA
tatgtaaactaccacatga

SEQ ID NO: 9180 - RNA, 19 nt, synthetic construct
  source 1..19: mol_type = other RNA
ttatgtaaactaccacatg

SEQ ID NO: 9181 - RNA, 19 nt, synthetic construct
  source 1..19: mol_type = other RNA
tttatgtaaactaccacat

SEQ ID NO: 9182 - RNA, 19 nt, synthetic construct
  source 1..19: mol_type = other RNA
gtttatgtaaactaccaca

SEQ ID NO: 9183 - RNA, 19 nt, synthetic construct
  source 1..19: mol_type = other RNA
agtttatgtaaactaccac

SEQ ID NO: 9184 - RNA, 19 nt, synthetic construct
  source 1..19: mol_type = other RNA
tagtttatgtaaactacca

SEQ ID NO: 9185 - RNA, 19 nt, synthetic construct
  source 1..19: mol_type = other RNA
ttagtttatgtaaactacc

SEQ ID NO: 9186 - RNA, 19 nt, synthetic construct
  source 1..19: mol_type = other RNA
cttagtttatgtaaactac

SEQ ID NO: 9187 - RNA, 19 nt, synthetic construct
  source 1..19: mol_type = other RNA
acttagtttatgtaaacta

SEQ ID NO: 9188 - RNA, 19 nt, synthetic construct
  source 1..19: mol_type = other RNA
cacttagtttatgtaaact

SEQ ID NO: 9189 - RNA, 19 nt, synthetic construct
  source 1..19: mol_type = other RNA
tcacttagtttatgtaaac

SEQ ID NO: 9190 - RNA, 19 nt, synthetic construct
  source 1..19: mol_type = other RNA
ttcacttagtttatgtaaa

SEQ ID NO: 9191 - RNA, 19 nt, synthetic construct
  source 1..19: mol_type = other RNA
cttcacttagtttatgtaa

SEQ ID NO: 9192 - RNA, 19 nt, synthetic construct
  source 1..19: mol_type = other RNA
tcttcacttagtttatgta

SEQ ID NO: 9193 - RNA, 19 nt, synthetic construct
  source 1..19: mol_type = other RNA
ctcttcacttagtttatgt

SEQ ID NO: 9194 - RNA, 19 nt, synthetic construct
  source 1..19: mol_type = other RNA
gctcttcacttagtttatg

SEQ ID NO: 9195 - RNA, 19 nt, synthetic construct
  source 1..19: mol_type = other RNA
ggctcttcacttagtttat

SEQ ID NO: 9196 - RNA, 19 nt, synthetic construct
  source 1..19: mol_type = other RNA
gggctcttcacttagttta

SEQ ID NO: 9197 - RNA, 19 nt, synthetic construct
  source 1..19: mol_type = other RNA
ggggctcttcacttagttt

SEQ ID NO: 9198 - RNA, 19 nt, synthetic construct
  source 1..19: mol_type = other RNA
aggggctcttcacttagtt

SEQ ID NO: 9199 - RNA, 19 nt, synthetic construct
  source 1..19: mol_type = other RNA
caggggctcttcacttagt

SEQ ID NO: 9200 - RNA, 19 nt, synthetic construct
  source 1..19: mol_type = other RNA
tcaggggctcttcacttag

SEQ ID NO: 9201 - RNA, 19 nt, synthetic construct
  source 1..19: mol_type = other RNA
atcaggggctcttcactta

SEQ ID NO: 9202 - RNA, 19 nt, synthetic construct
  source 1..19: mol_type = other RNA
aatcaggggctcttcactt

SEQ ID NO: 9203 - RNA, 19 nt, synthetic construct
  source 1..19: mol_type = other RNA
gaatcaggggctcttcact

SEQ ID NO: 9204 - RNA, 19 nt, synthetic construct
  source 1..19: mol_type = other RNA
ggaatcaggggctcttcac

SEQ ID NO: 9205 - RNA, 19 nt, synthetic construct
  source 1..19: mol_type = other RNA
aggaatcaggggctcttca

SEQ ID NO: 9206 - RNA, 19 nt, synthetic construct
  source 1..19: mol_type = other RNA
gaggaatcaggggctcttc

SEQ ID NO: 9207 - RNA, 19 nt, synthetic construct
  source 1..19: mol_type = other RNA
ggaggaatcaggggctctt

SEQ ID NO: 9208 - RNA, 19 nt, synthetic construct
  source 1..19: mol_type = other RNA
aggaggaatcaggggctct

SEQ ID NO: 9209 - RNA, 19 nt, synthetic construct
  source 1..19: mol_type = other RNA
gaggaggaatcaggggctc

SEQ ID NO: 9210 - RNA, 19 nt, synthetic construct
  source 1..19: mol_type = other RNA
ggaggaggaatcaggggct

SEQ ID NO: 9211 - RNA, 19 nt, synthetic construct
  source 1..19: mol_type = other RNA
aggaggaggaatcaggggc

SEQ ID NO: 9212 - RNA, 19 nt, synthetic construct
  source 1..19: mol_type = other RNA
gaggaggaggaatcagggg

SEQ ID NO: 9213 - RNA, 19 nt, synthetic construct
  source 1..19: mol_type = other RNA
agaggaggaggaatcaggg

SEQ ID NO: 9214 - RNA, 19 nt, synthetic construct
  source 1..19: mol_type = other RNA
aagaggaggaggaatcagg

SEQ ID NO: 9215 - RNA, 19 nt, synthetic construct
  source 1..19: mol_type = other RNA
gaagaggaggaggaatcag

SEQ ID NO: 9216 - RNA, 19 nt, synthetic construct
  source 1..19: mol_type = other RNA
ggaagaggaggaggaatca

SEQ ID NO: 9217 - RNA, 19 nt, synthetic construct
  source 1..19: mol_type = other RNA
aggaagaggaggaggaatc

SEQ ID NO: 9218 - RNA, 19 nt, synthetic construct
  source 1..19: mol_type = other RNA
gaggaagaggaggaggaat

SEQ ID NO: 9219 - RNA, 19 nt, synthetic construct
  source 1..19: mol_type = other RNA
ggaggaagaggaggaggaa

SEQ ID NO: 9220 - RNA, 19 nt, synthetic construct
  source 1..19: mol_type = other RNA
aggaggaagaggaggagga

SEQ ID NO: 9221 - RNA, 19 nt, synthetic construct
  source 1..19: mol_type = other RNA
gaggaggaagaggaggagg

SEQ ID NO: 9222 - RNA, 19 nt, synthetic construct
  source 1..19: mol_type = other RNA
cgaggaggaagaggaggag

SEQ ID NO: 9223 - RNA, 19 nt, synthetic construct
  source 1..19: mol_type = other RNA
tcgaggaggaagaggagga

SEQ ID NO: 9224 - RNA, 19 nt, synthetic construct
  source 1..19: mol_type = other RNA
ttcgaggaggaagaggagg

SEQ ID NO: 9225 - RNA, 19 nt, synthetic construct
  source 1..19: mol_type = other RNA
tttcgaggaggaagaggag

SEQ ID NO: 9226 - RNA, 19 nt, synthetic construct
  source 1..19: mol_type = other RNA
ttttcgaggaggaagagga

SEQ ID NO: 9227 - RNA, 19 nt, synthetic construct
  source 1..19: mol_type = other RNA
tttttcgaggaggaagagg

SEQ ID NO: 9228 - RNA, 19 nt, synthetic construct
  source 1..19: mol_type = other RNA
ttttttcgaggaggaagag

SEQ ID NO: 9229 - RNA, 19 nt, synthetic construct
  source 1..19: mol_type = other RNA
cttttttcgaggaggaaga

SEQ ID NO: 9230 - RNA, 19 nt, synthetic construct
  source 1..19: mol_type = other RNA
acttttttcgaggaggaag

SEQ ID NO: 9231 - RNA, 19 nt, synthetic construct
  source 1..19: mol_type = other RNA
aacttttttcgaggaggaa

SEQ ID NO: 9232 - RNA, 19 nt, synthetic construct
  source 1..19: mol_type = other RNA
aaacttttttcgaggagga

SEQ ID NO: 9233 - RNA, 19 nt, synthetic construct
  source 1..19: mol_type = other RNA
caaacttttttcgaggagg

SEQ ID NO: 9234 - RNA, 19 nt, synthetic construct
  source 1..19: mol_type = other RNA
tcaaacttttttcgaggag

SEQ ID NO: 9235 - RNA, 19 nt, synthetic construct
  source 1..19: mol_type = other RNA
atcaaacttttttcgagga

SEQ ID NO: 9236 - RNA, 19 nt, synthetic construct
  source 1..19: mol_type = other RNA
gatcaaacttttttcgagg

SEQ ID NO: 9237 - RNA, 19 nt, synthetic construct
  source 1..19: mol_type = other RNA
tgatcaaacttttttcgag

SEQ ID NO: 9238 - RNA, 19 nt, synthetic construct
  source 1..19: mol_type = other RNA
atgatcaaacttttttcga

SEQ ID NO: 9239 - RNA, 19 nt, synthetic construct
  source 1..19: mol_type = other RNA
catgatcaaacttttttcg

SEQ ID NO: 9240 - RNA, 19 nt, synthetic construct
  source 1..19: mol_type = other RNA
tcatgatcaaacttttttc

SEQ ID NO: 9241 - RNA, 19 nt, synthetic construct
  source 1..19: mol_type = other RNA
atcatgatcaaactttttt

SEQ ID NO: 9242 - RNA, 19 nt, synthetic construct
  source 1..19: mol_type = other RNA
catcatgatcaaacttttt

SEQ ID NO: 9243 - RNA, 19 nt, synthetic construct
  source 1..19: mol_type = other RNA
gcatcatgatcaaactttt

SEQ ID NO: 9244 - RNA, 19 nt, synthetic construct
  source 1..19: mol_type = other RNA
agcatcatgatcaaacttt

SEQ ID NO: 9245 - RNA, 19 nt, synthetic construct
  source 1..19: mol_type = other RNA
aagcatcatgatcaaactt

SEQ ID NO: 9246 - RNA, 19 nt, synthetic construct
  source 1..19: mol_type = other RNA
gaagcatcatgatcaaact

SEQ ID NO: 9247 - RNA, 19 nt, synthetic construct
  source 1..19: mol_type = other RNA
tgaagcatcatgatcaaac

SEQ ID NO: 9248 - RNA, 19 nt, synthetic construct
  source 1..19: mol_type = other RNA
ttgaagcatcatgatcaaa

SEQ ID NO: 9249 - RNA, 19 nt, synthetic construct
  source 1..19: mol_type = other RNA
tttgaagcatcatgatcaa

SEQ ID NO: 9250 - RNA, 19 nt, synthetic construct
  source 1..19: mol_type = other RNA
atttgaagcatcatgatca

SEQ ID NO: 9251 - RNA, 19 nt, synthetic construct
  source 1..19: mol_type = other RNA
aatttgaagcatcatgatc

SEQ ID NO: 9252 - RNA, 19 nt, synthetic construct
  source 1..19: mol_type = other RNA
gaatttgaagcatcatgat

SEQ ID NO: 9253 - RNA, 19 nt, synthetic construct
  source 1..19: mol_type = other RNA
ggaatttgaagcatcatga

SEQ ID NO: 9254 - RNA, 19 nt, synthetic construct
  source 1..19: mol_type = other RNA
tggaatttgaagcatcatg

SEQ ID NO: 9255 - RNA, 19 nt, synthetic construct
  source 1..19: mol_type = other RNA
ttggaatttgaagcatcat

SEQ ID NO: 9256 - RNA, 19 nt, synthetic construct
  source 1..19: mol_type = other RNA
cttggaatttgaagcatca

SEQ ID NO: 9257 - RNA, 19 nt, synthetic construct
  source 1..19: mol_type = other RNA
ccttggaatttgaagcatc

SEQ ID NO: 9258 - RNA, 19 nt, synthetic construct
  source 1..19: mol_type = other RNA
cccttggaatttgaagcat

SEQ ID NO: 9259 - RNA, 19 nt, synthetic construct
  source 1..19: mol_type = other RNA
tcccttggaatttgaagca

SEQ ID NO: 9260 - RNA, 19 nt, synthetic construct
  source 1..19: mol_type = other RNA
ttcccttggaatttgaagc

SEQ ID NO: 9261 - RNA, 19 nt, synthetic construct
  source 1..19: mol_type = other RNA
tttcccttggaatttgaag

SEQ ID NO: 9262 - RNA, 19 nt, synthetic construct
  source 1..19: mol_type = other RNA
atttcccttggaatttgaa

SEQ ID NO: 9263 - RNA, 19 nt, synthetic construct
  source 1..19: mol_type = other RNA
tatttcccttggaatttga

SEQ ID NO: 9264 - RNA, 19 nt, synthetic construct
  source 1..19: mol_type = other RNA
atatttcccttggaatttg

SEQ ID NO: 9265 - RNA, 19 nt, synthetic construct
  source 1..19: mol_type = other RNA
catatttcccttggaattt

SEQ ID NO: 9266 - RNA, 19 nt, synthetic construct
  source 1..19: mol_type = other RNA
tcatatttcccttggaatt

SEQ ID NO: 9267 - RNA, 19 nt, synthetic construct
  source 1..19: mol_type = other RNA
ttcatatttcccttggaat

SEQ ID NO: 9268 - RNA, 19 nt, synthetic construct
  source 1..19: mol_type = other RNA
tttcatatttcccttggaa

SEQ ID NO: 9269 - RNA, 19 nt, synthetic construct
  source 1..19: mol_type = other RNA
atttcatatttcccttgga

SEQ ID NO: 9270 - RNA, 19 nt, synthetic construct
  source 1..19: mol_type = other RNA
gatttcatatttcccttgg

SEQ ID NO: 9271 - RNA, 19 nt, synthetic construct
  source 1..19: mol_type = other RNA
agatttcatatttcccttg

SEQ ID NO: 9272 - RNA, 19 nt, synthetic construct
  source 1..19: mol_type = other RNA
cagatttcatatttccctt

SEQ ID NO: 9273 - RNA, 19 nt, synthetic construct
  source 1..19: mol_type = other RNA
tcagatttcatatttccct

SEQ ID NO: 9274 - RNA, 19 nt, synthetic construct
  source 1..19: mol_type = other RNA
atcagatttcatatttccc

SEQ ID NO: 9275 - RNA, 19 nt, synthetic construct
  source 1..19: mol_type = other RNA
catcagatttcatatttcc

SEQ ID NO: 9276 - RNA, 19 nt, synthetic construct
  source 1..19: mol_type = other RNA
tcatcagatttcatatttc

SEQ ID NO: 9277 - RNA, 19 nt, synthetic construct
  source 1..19: mol_type = other RNA
atcatcagatttcatattt

SEQ ID NO: 9278 - RNA, 19 nt, synthetic construct
  source 1..19: mol_type = other RNA
catcatcagatttcatatt

SEQ ID NO: 9279 - RNA, 19 nt, synthetic construct
  source 1..19: mol_type = other RNA
tcatcatcagatttcatat

SEQ ID NO: 9280 - RNA, 19 nt, synthetic construct
  source 1..19: mol_type = other RNA
atcatcatcagatttcata

SEQ ID NO: 9281 - RNA, 19 nt, synthetic construct
  source 1..19: mol_type = other RNA
gatcatcatcagatttcat

SEQ ID NO: 9282 - RNA, 19 nt, synthetic construct
  source 1..19: mol_type = other RNA
ggatcatcatcagatttca

SEQ ID NO: 9283 - RNA, 19 nt, synthetic construct
  source 1..19: mol_type = other RNA
aggatcatcatcagatttc

SEQ ID NO: 9284 - RNA, 19 nt, synthetic construct
  source 1..19: mol_type = other RNA
gaggatcatcatcagattt

SEQ ID NO: 9285 - RNA, 19 nt, synthetic construct
  source 1..19: mol_type = other RNA
ggaggatcatcatcagatt

SEQ ID NO: 9286 - RNA, 19 nt, synthetic construct
  source 1..19: mol_type = other RNA
aggaggatcatcatcagat

SEQ ID NO: 9287 - RNA, 19 nt, synthetic construct
  source 1..19: mol_type = other RNA
caggaggatcatcatcaga

SEQ ID NO: 9288 - RNA, 19 nt, synthetic construct
  source 1..19: mol_type = other RNA
gcaggaggatcatcatcag

SEQ ID NO: 9289 - RNA, 19 nt, synthetic construct
  source 1..19: mol_type = other RNA
agcaggaggatcatcatca

SEQ ID NO: 9290 - RNA, 19 nt, synthetic construct
  source 1..19: mol_type = other RNA
tagcaggaggatcatcatc

SEQ ID NO: 9291 - RNA, 19 nt, synthetic construct
  source 1..19: mol_type = other RNA
atagcaggaggatcatcat

SEQ ID NO: 9292 - RNA, 19 nt, synthetic construct
  source 1..19: mol_type = other RNA
aatagcaggaggatcatca

SEQ ID NO: 9293 - RNA, 19 nt, synthetic construct
  source 1..19: mol_type = other RNA
gaatagcaggaggatcatc

SEQ ID NO: 9294 - RNA, 19 nt, synthetic construct
  source 1..19: mol_type = other RNA
ggaatagcaggaggatcat

SEQ ID NO: 9295 - RNA, 19 nt, synthetic construct
  source 1..19: mol_type = other RNA
tggaatagcaggaggatca

SEQ ID NO: 9296 - RNA, 19 nt, synthetic construct
  source 1..19: mol_type = other RNA
gtggaatagcaggaggatc

SEQ ID NO: 9297 - RNA, 19 nt, synthetic construct
  source 1..19: mol_type = other RNA
ggtggaatagcaggaggat

SEQ ID NO: 9298 - RNA, 19 nt, synthetic construct
  source 1..19: mol_type = other RNA
cggtggaatagcaggagga

SEQ ID NO: 9299 - RNA, 19 nt, synthetic construct
  source 1..19: mol_type = other RNA
tcggtggaatagcaggagg

SEQ ID NO: 9300 - RNA, 19 nt, synthetic construct
  source 1..19: mol_type = other RNA
ctcggtggaatagcaggag

SEQ ID NO: 9301 - RNA, 19 nt, synthetic construct
  source 1..19: mol_type = other RNA
tctcggtggaatagcagga

SEQ ID NO: 9302 - RNA, 19 nt, synthetic construct
  source 1..19: mol_type = other RNA
gtctcggtggaatagcagg

SEQ ID NO: 9303 - RNA, 19 nt, synthetic construct
  source 1..19: mol_type = other RNA
tgtctcggtggaatagcag

SEQ ID NO: 9304 - RNA, 19 nt, synthetic construct
  source 1..19: mol_type = other RNA
ctgtctcggtggaatagca

SEQ ID NO: 9305 - RNA, 19 nt, synthetic construct
  source 1..19: mol_type = other RNA
gctgtctcggtggaatagc

SEQ ID NO: 9306 - RNA, 19 nt, synthetic construct
  source 1..19: mol_type = other RNA
ggctgtctcggtggaatag

SEQ ID NO: 9307 - RNA, 19 nt, synthetic construct
  source 1..19: mol_type = other RNA
aggctgtctcggtggaata

SEQ ID NO: 9308 - RNA, 19 nt, synthetic construct
  source 1..19: mol_type = other RNA
gaggctgtctcggtggaat

SEQ ID NO: 9309 - RNA, 19 nt, synthetic construct
  source 1..19: mol_type = other RNA
ggaggctgtctcggtggaa

SEQ ID NO: 9310 - RNA, 19 nt, synthetic construct
  source 1..19: mol_type = other RNA
aggaggctgtctcggtgga

SEQ ID NO: 9311 - RNA, 19 nt, synthetic construct
  source 1..19: mol_type = other RNA
gaggaggctgtctcggtgg

SEQ ID NO: 9312 - RNA, 19 nt, synthetic construct
  source 1..19: mol_type = other RNA
ggaggaggctgtctcggtg

SEQ ID NO: 9313 - RNA, 19 nt, synthetic construct
  source 1..19: mol_type = other RNA
aggaggaggctgtctcggt

SEQ ID NO: 9314 - RNA, 19 nt, synthetic construct
  source 1..19: mol_type = other RNA
gaggaggaggctgtctcgg

SEQ ID NO: 9315 - RNA, 19 nt, synthetic construct
  source 1..19: mol_type = other RNA
ggaggaggaggctgtctcg

SEQ ID NO: 9316 - RNA, 19 nt, synthetic construct
  source 1..19: mol_type = other RNA
tggaggaggaggctgtctc

SEQ ID NO: 9317 - RNA, 19 nt, synthetic construct
  source 1..19: mol_type = other RNA
ttggaggaggaggctgtct

SEQ ID NO: 9318 - RNA, 19 nt, synthetic construct
  source 1..19: mol_type = other RNA
tttggaggaggaggctgtc

SEQ ID NO: 9319 - RNA, 19 nt, synthetic construct
  source 1..19: mol_type = other RNA
ctttggaggaggaggctgt

SEQ ID NO: 9320 - RNA, 19 nt, synthetic construct
  source 1..19: mol_type = other RNA
cctttggaggaggaggctg

SEQ ID NO: 9321 - RNA, 19 nt, synthetic construct
  source 1..19: mol_type = other RNA
acctttggaggaggaggct

SEQ ID NO: 9322 - RNA, 19 nt, synthetic construct
  source 1..19: mol_type = other RNA
tacctttggaggaggaggc

SEQ ID NO: 9323 - RNA, 19 nt, synthetic construct
  source 1..19: mol_type = other RNA
ttacctttggaggaggagg

SEQ ID NO: 9324 - RNA, 19 nt, synthetic construct
  source 1..19: mol_type = other RNA
tttacctttggaggaggag

SEQ ID NO: 9325 - RNA, 19 nt, synthetic construct
  source 1..19: mol_type = other RNA
ttttacctttggaggagga

SEQ ID NO: 9326 - RNA, 19 nt, synthetic construct
  source 1..19: mol_type = other RNA
gttttacctttggaggagg

SEQ ID NO: 9327 - RNA, 19 nt, synthetic construct
  source 1..19: mol_type = other RNA
ggttttacctttggaggag

SEQ ID NO: 9328 - RNA, 19 nt, synthetic construct
  source 1..19: mol_type = other RNA
gggttttacctttggagga

SEQ ID NO: 9329 - RNA, 19 nt, synthetic construct
  source 1..19: mol_type = other RNA
tgggttttacctttggagg

SEQ ID NO: 9330 - RNA, 19 nt, synthetic construct
  source 1..19: mol_type = other RNA
ctgggttttacctttggag

SEQ ID NO: 9331 - RNA, 19 nt, synthetic construct
  source 1..19: mol_type = other RNA
tctgggttttacctttgga

SEQ ID NO: 9332 - RNA, 19 nt, synthetic construct
  source 1..19: mol_type = other RNA
ctctgggttttacctttgg

SEQ ID NO: 9333 - RNA, 19 nt, synthetic construct
  source 1..19: mol_type = other RNA
actctgggttttacctttg

SEQ ID NO: 9334 - RNA, 19 nt, synthetic construct
  source 1..19: mol_type = other RNA
aactctgggttttaccttt

SEQ ID NO: 9335 - RNA, 19 nt, synthetic construct
  source 1..19: mol_type = other RNA
gaactctgggttttacctt

SEQ ID NO: 9336 - RNA, 19 nt, synthetic construct
  source 1..19: mol_type = other RNA
ggaactctgggttttacct

SEQ ID NO: 9337 - RNA, 19 nt, synthetic construct
  source 1..19: mol_type = other RNA
aggaactctgggttttacc

SEQ ID NO: 9338 - RNA, 19 nt, synthetic construct
  source 1..19: mol_type = other RNA
caggaactctgggttttac

SEQ ID NO: 9339 - RNA, 19 nt, synthetic construct
  source 1..19: mol_type = other RNA
acaggaactctgggtttta

SEQ ID NO: 9340 - RNA, 19 nt, synthetic construct
  source 1..19: mol_type = other RNA
aacaggaactctgggtttt

SEQ ID NO: 9341 - RNA, 19 nt, synthetic construct
  source 1..19: mol_type = other RNA
gaacaggaactctgggttt

SEQ ID NO: 9342 - RNA, 19 nt, synthetic construct
  source 1..19: mol_type = other RNA
ggaacaggaactctgggtt

SEQ ID NO: 9343 - RNA, 19 nt, synthetic construct
  source 1..19: mol_type = other RNA
aggaacaggaactctgggt

SEQ ID NO: 9344 - RNA, 19 nt, synthetic construct
  source 1..19: mol_type = other RNA
taggaacaggaactctggg

SEQ ID NO: 9345 - RNA, 19 nt, synthetic construct
  source 1..19: mol_type = other RNA
gtaggaacaggaactctgg

SEQ ID NO: 9346 - RNA, 19 nt, synthetic construct
  source 1..19: mol_type = other RNA
agtaggaacaggaactctg

SEQ ID NO: 9347 - RNA, 19 nt, synthetic construct
  source 1..19: mol_type = other RNA
cagtaggaacaggaactct

SEQ ID NO: 9348 - RNA, 19 nt, synthetic construct
  source 1..19: mol_type = other RNA
ccagtaggaacaggaactc

SEQ ID NO: 9349 - RNA, 19 nt, synthetic construct
  source 1..19: mol_type = other RNA
accagtaggaacaggaact

SEQ ID NO: 9350 - RNA, 19 nt, synthetic construct
  source 1..19: mol_type = other RNA
caccagtaggaacaggaac

SEQ ID NO: 9351 - RNA, 19 nt, synthetic construct
  source 1..19: mol_type = other RNA
gcaccagtaggaacaggaa

SEQ ID NO: 9352 - RNA, 19 nt, synthetic construct
  source 1..19: mol_type = other RNA
tgcaccagtaggaacagga

SEQ ID NO: 9353 - RNA, 19 nt, synthetic construct
  source 1..19: mol_type = other RNA
atgcaccagtaggaacagg

SEQ ID NO: 9354 - RNA, 19 nt, synthetic construct
  source 1..19: mol_type = other RNA
aatgcaccagtaggaacag

SEQ ID NO: 9355 - RNA, 19 nt, synthetic construct
  source 1..19: mol_type = other RNA
aaatgcaccagtaggaaca

SEQ ID NO: 9356 - RNA, 19 nt, synthetic construct
  source 1..19: mol_type = other RNA
caaatgcaccagtaggaac

SEQ ID NO: 9357 - RNA, 19 nt, synthetic construct
  source 1..19: mol_type = other RNA
tcaaatgcaccagtaggaa

SEQ ID NO: 9358 - RNA, 19 nt, synthetic construct
  source 1..19: mol_type = other RNA
atcaaatgcaccagtagga

SEQ ID NO: 9359 - RNA, 19 nt, synthetic construct
  source 1..19: mol_type = other RNA
catcaaatgcaccagtagg

SEQ ID NO: 9360 - RNA, 19 nt, synthetic construct
  source 1..19: mol_type = other RNA
ccatcaaatgcaccagtag

SEQ ID NO: 9361 - RNA, 19 nt, synthetic construct
  source 1..19: mol_type = other RNA
cccatcaaatgcaccagta

SEQ ID NO: 9362 - RNA, 19 nt, synthetic construct
  source 1..19: mol_type = other RNA
gcccatcaaatgcaccagt

SEQ ID NO: 9363 - RNA, 19 nt, synthetic construct
  source 1..19: mol_type = other RNA
ggcccatcaaatgcaccag

SEQ ID NO: 9364 - RNA, 19 nt, synthetic construct
  source 1..19: mol_type = other RNA
aggcccatcaaatgcacca

SEQ ID NO: 9365 - RNA, 19 nt, synthetic construct
  source 1..19: mol_type = other RNA
gaggcccatcaaatgcacc

SEQ ID NO: 9366 - RNA, 19 nt, synthetic construct
  source 1..19: mol_type = other RNA
agaggcccatcaaatgcac

SEQ ID NO: 9367 - RNA, 19 nt, synthetic construct
  source 1..19: mol_type = other RNA
cagaggcccatcaaatgca

SEQ ID NO: 9368 - RNA, 19 nt, synthetic construct
  source 1..19: mol_type = other RNA
gcagaggcccatcaaatgc

SEQ ID NO: 9369 - RNA, 19 nt, synthetic construct
  source 1..19: mol_type = other RNA
tgcagaggcccatcaaatg

SEQ ID NO: 9370 - RNA, 19 nt, synthetic construct
  source 1..19: mol_type = other RNA
atgcagaggcccatcaaat

SEQ ID NO: 9371 - RNA, 19 nt, synthetic construct
  source 1..19: mol_type = other RNA
tatgcagaggcccatcaaa

SEQ ID NO: 9372 - RNA, 19 nt, synthetic construct
  source 1..19: mol_type = other RNA
ctatgcagaggcccatcaa

SEQ ID NO: 9373 - RNA, 19 nt, synthetic construct
  source 1..19: mol_type = other RNA
actatgcagaggcccatca

SEQ ID NO: 9374 - RNA, 19 nt, synthetic construct
  source 1..19: mol_type = other RNA
gactatgcagaggcccatc

SEQ ID NO: 9375 - RNA, 19 nt, synthetic construct
  source 1..19: mol_type = other RNA
ggactatgcagaggcccat

SEQ ID NO: 9376 - RNA, 19 nt, synthetic construct
  source 1..19: mol_type = other RNA
tggactatgcagaggccca

SEQ ID NO: 9377 - RNA, 19 nt, synthetic construct
  source 1..19: mol_type = other RNA
gtggactatgcagaggccc

SEQ ID NO: 9378 - RNA, 19 nt, synthetic construct
  source 1..19: mol_type = other RNA
ggtggactatgcagaggcc

SEQ ID NO: 9379 - RNA, 19 nt, synthetic construct
  source 1..19: mol_type = other RNA
aggtggactatgcagaggc

SEQ ID NO: 9380 - RNA, 19 nt, synthetic construct
  source 1..19: mol_type = other RNA
gaggtggactatgcagagg

SEQ ID NO: 9381 - RNA, 19 nt, synthetic construct
  source 1..19: mol_type = other RNA
ggaggtggactatgcagag

SEQ ID NO: 9382 - RNA, 19 nt, synthetic construct
  source 1..19: mol_type = other RNA
cggaggtggactatgcaga

SEQ ID NO: 9383 - RNA, 19 nt, synthetic construct
  source 1..19: mol_type = other RNA
gcggaggtggactatgcag

SEQ ID NO: 9384 - RNA, 19 nt, synthetic construct
  source 1..19: mol_type = other RNA
ggcggaggtggactatgca

SEQ ID NO: 9385 - RNA, 19 nt, synthetic construct
  source 1..19: mol_type = other RNA
tggcggaggtggactatgc

SEQ ID NO: 9386 - RNA, 19 nt, synthetic construct
  source 1..19: mol_type = other RNA
gtggcggaggtggactatg

SEQ ID NO: 9387 - RNA, 19 nt, synthetic construct
  source 1..19: mol_type = other RNA
ggtggcggaggtggactat

SEQ ID NO: 9388 - RNA, 19 nt, synthetic construct
  source 1..19: mol_type = other RNA
tggtggcggaggtggacta

SEQ ID NO: 9389 - RNA, 19 nt, synthetic construct
  source 1..19: mol_type = other RNA
gtggtggcggaggtggact

SEQ ID NO: 9390 - RNA, 19 nt, synthetic construct
  source 1..19: mol_type = other RNA
ggtggtggcggaggtggac

SEQ ID NO: 9391 - RNA, 19 nt, synthetic construct
  source 1..19: mol_type = other RNA
tggtggtggcggaggtgga

SEQ ID NO: 9392 - RNA, 19 nt, synthetic construct
  source 1..19: mol_type = other RNA
ttggtggtggcggaggtgg

SEQ ID NO: 9393 - RNA, 19 nt, synthetic construct
  source 1..19: mol_type = other RNA
cttggtggtggcggaggtg

SEQ ID NO: 9394 - RNA, 19 nt, synthetic construct
  source 1..19: mol_type = other RNA
tcttggtggtggcggaggt

SEQ ID NO: 9395 - RNA, 19 nt, synthetic construct
  source 1..19: mol_type = other RNA
ctcttggtggtggcggagg

SEQ ID NO: 9396 - RNA, 19 nt, synthetic construct
  source 1..19: mol_type = other RNA
tctcttggtggtggcggag

SEQ ID NO: 9397 - RNA, 19 nt, synthetic construct
  source 1..19: mol_type = other RNA
atctcttggtggtggcgga

SEQ ID NO: 9398 - RNA, 19 nt, synthetic construct
  source 1..19: mol_type = other RNA
gatctcttggtggtggcgg

SEQ ID NO: 9399 - RNA, 19 nt, synthetic construct
  source 1..19: mol_type = other RNA
ggatctcttggtggtggcg

SEQ ID NO: 9400 - RNA, 19 nt, synthetic construct
  source 1..19: mol_type = other RNA
aggatctcttggtggtggc

SEQ ID NO: 9401 - RNA, 19 nt, synthetic construct
  source 1..19: mol_type = other RNA
gaggatctcttggtggtgg

SEQ ID NO: 9402 - RNA, 19 nt, synthetic construct
  source 1..19: mol_type = other RNA
agaggatctcttggtggtg

SEQ ID NO: 9403 - RNA, 19 nt, synthetic construct
  source 1..19: mol_type = other RNA
aagaggatctcttggtggt

SEQ ID NO: 9404 - RNA, 19 nt, synthetic construct
  source 1..19: mol_type = other RNA
gaagaggatctcttggtgg

SEQ ID NO: 9405 - RNA, 19 nt, synthetic construct
  source 1..19: mol_type = other RNA
ggaagaggatctcttggtg

SEQ ID NO: 9406 - RNA, 19 nt, synthetic construct
  source 1..19: mol_type = other RNA
aggaagaggatctcttggt

SEQ ID NO: 9407 - RNA, 19 nt, synthetic construct
  source 1..19: mol_type = other RNA
caggaagaggatctcttgg

SEQ ID NO: 9408 - RNA, 19 nt, synthetic construct
  source 1..19: mol_type = other RNA
tcaggaagaggatctcttg

SEQ ID NO: 9409 - RNA, 19 nt, synthetic construct
  source 1..19: mol_type = other RNA
atcaggaagaggatctctt

SEQ ID NO: 9410 - RNA, 19 nt, synthetic construct
  source 1..19: mol_type = other RNA
tatcaggaagaggatctct

SEQ ID NO: 9411 - RNA, 19 nt, synthetic construct
  source 1..19: mol_type = other RNA
gtatcaggaagaggatctc

SEQ ID NO: 9412 - RNA, 19 nt, synthetic construct
  source 1..19: mol_type = other RNA
ggtatcaggaagaggatct

SEQ ID NO: 9413 - RNA, 19 nt, synthetic construct
  source 1..19: mol_type = other RNA
gggtatcaggaagaggatc

SEQ ID NO: 9414 - RNA, 19 nt, synthetic construct
  source 1..19: mol_type = other RNA
ggggtatcaggaagaggat

SEQ ID NO: 9415 - RNA, 19 nt, synthetic construct
  source 1..19: mol_type = other RNA
aggggtatcaggaagagga

SEQ ID NO: 9416 - RNA, 19 nt, synthetic construct
  source 1..19: mol_type = other RNA
gaggggtatcaggaagagg

SEQ ID NO: 9417 - RNA, 19 nt, synthetic construct
  source 1..19: mol_type = other RNA
ggaggggtatcaggaagag

SEQ ID NO: 9418 - RNA, 19 nt, synthetic construct
  source 1..19: mol_type = other RNA
tggaggggtatcaggaaga

SEQ ID NO: 9419 - RNA, 19 nt, synthetic construct
  source 1..19: mol_type = other RNA
gtggaggggtatcaggaag

SEQ ID NO: 9420 - RNA, 19 nt, synthetic construct
  source 1..19: mol_type = other RNA
ggtggaggggtatcaggaa

SEQ ID NO: 9421 - RNA, 19 nt, synthetic construct
  source 1..19: mol_type = other RNA
tggtggaggggtatcagga

SEQ ID NO: 9422 - RNA, 19 nt, synthetic construct
  source 1..19: mol_type = other RNA
ctggtggaggggtatcagg

SEQ ID NO: 9423 - RNA, 19 nt, synthetic construct
  source 1..19: mol_type = other RNA
actggtggaggggtatcag

SEQ ID NO: 9424 - RNA, 19 nt, synthetic construct
  source 1..19: mol_type = other RNA
aactggtggaggggtatca

SEQ ID NO: 9425 - RNA, 19 nt, synthetic construct
  source 1..19: mol_type = other RNA
gaactggtggaggggtatc

SEQ ID NO: 9426 - RNA, 19 nt, synthetic construct
  source 1..19: mol_type = other RNA
ggaactggtggaggggtat

SEQ ID NO: 9427 - RNA, 19 nt, synthetic construct
  source 1..19: mol_type = other RNA
gggaactggtggaggggta

SEQ ID NO: 9428 - RNA, 19 nt, synthetic construct
  source 1..19: mol_type = other RNA
ggggaactggtggaggggt

SEQ ID NO: 9429 - RNA, 19 nt, synthetic construct
  source 1..19: mol_type = other RNA
aggggaactggtggagggg

SEQ ID NO: 9430 - RNA, 19 nt, synthetic construct
  source 1..19: mol_type = other RNA
aaggggaactggtggaggg

SEQ ID NO: 9431 - RNA, 19 nt, synthetic construct
  source 1..19: mol_type = other RNA
gaaggggaactggtggagg

SEQ ID NO: 9432 - RNA, 19 nt, synthetic construct
  source 1..19: mol_type = other RNA
cgaaggggaactggtggag

SEQ ID NO: 9433 - RNA, 19 nt, synthetic construct
  source 1..19: mol_type = other RNA
ccgaaggggaactggtgga

SEQ ID NO: 9434 - RNA, 19 nt, synthetic construct
  source 1..19: mol_type = other RNA
gccgaaggggaactggtgg

SEQ ID NO: 9435 - RNA, 19 nt, synthetic construct
  source 1..19: mol_type = other RNA
ggccgaaggggaactggtg

SEQ ID NO: 9436 - RNA, 19 nt, synthetic construct
  source 1..19: mol_type = other RNA
aggccgaaggggaactggt

SEQ ID NO: 9437 - RNA, 19 nt, synthetic construct
  source 1..19: mol_type = other RNA
gaggccgaaggggaactgg

SEQ ID NO: 9438 - RNA, 19 nt, synthetic construct
  source 1..19: mol_type = other RNA
ggaggccgaaggggaactg

SEQ ID NO: 9439 - RNA, 19 nt, synthetic construct
  source 1..19: mol_type = other RNA
tggaggccgaaggggaact

SEQ ID NO: 9440 - RNA, 19 nt, synthetic construct
  source 1..19: mol_type = other RNA
ctggaggccgaaggggaac

SEQ ID NO: 9441 - RNA, 19 nt, synthetic construct
  source 1..19: mol_type = other RNA
tctggaggccgaaggggaa

SEQ ID NO: 9442 - RNA, 19 nt, synthetic construct
  source 1..19: mol_type = other RNA
ttctggaggccgaagggga

SEQ ID NO: 9443 - RNA, 19 nt, synthetic construct
  source 1..19: mol_type = other RNA
gttctggaggccgaagggg

SEQ ID NO: 9444 - RNA, 19 nt, synthetic construct
  source 1..19: mol_type = other RNA
tgttctggaggccgaaggg

SEQ ID NO: 9445 - RNA, 19 nt, synthetic construct
  source 1..19: mol_type = other RNA
gtgttctggaggccgaagg

SEQ ID NO: 9446 - RNA, 19 nt, synthetic construct
  source 1..19: mol_type = other RNA
agtgttctggaggccgaag

SEQ ID NO: 9447 - RNA, 19 nt, synthetic construct
  source 1..19: mol_type = other RNA
aagtgttctggaggccgaa

SEQ ID NO: 9448 - RNA, 19 nt, synthetic construct
  source 1..19: mol_type = other RNA
aaagtgttctggaggccga

SEQ ID NO: 9449 - RNA, 19 nt, synthetic construct
  source 1..19: mol_type = other RNA
taaagtgttctggaggccg

SEQ ID NO: 9450 - RNA, 19 nt, synthetic construct
  source 1..19: mol_type = other RNA
ataaagtgttctggaggcc

SEQ ID NO: 9451 - RNA, 19 nt, synthetic construct
  source 1..19: mol_type = other RNA
tataaagtgttctggaggc

SEQ ID NO: 9452 - RNA, 19 nt, synthetic construct
  source 1..19: mol_type = other RNA
ttataaagtgttctggagg

SEQ ID NO: 9453 - RNA, 19 nt, synthetic construct
  source 1..19: mol_type = other RNA
tttataaagtgttctggag

SEQ ID NO: 9454 - RNA, 19 nt, synthetic construct
  source 1..19: mol_type = other RNA
gtttataaagtgttctgga

SEQ ID NO: 9455 - RNA, 19 nt, synthetic construct
  source 1..19: mol_type = other RNA
agtttataaagtgttctgg

SEQ ID NO: 9456 - RNA, 19 nt, synthetic construct
  source 1..19: mol_type = other RNA
cagtttataaagtgttctg

SEQ ID NO: 9457 - RNA, 19 nt, synthetic construct
  source 1..19: mol_type = other RNA
acagtttataaagtgttct

SEQ ID NO: 9458 - RNA, 19 nt, synthetic construct
  source 1..19: mol_type = other RNA
gacagtttataaagtgttc

SEQ ID NO: 9459 - RNA, 19 nt, synthetic construct
  source 1..19: mol_type = other RNA
ggacagtttataaagtgtt

SEQ ID NO: 9460 - RNA, 19 nt, synthetic construct
  source 1..19: mol_type = other RNA
tggacagtttataaagtgt

SEQ ID NO: 9461 - RNA, 19 nt, synthetic construct
  source 1..19: mol_type = other RNA
atggacagtttataaagtg

SEQ ID NO: 9462 - RNA, 19 nt, synthetic construct
  source 1..19: mol_type = other RNA
aatggacagtttataaagt

SEQ ID NO: 9463 - RNA, 19 nt, synthetic construct
  source 1..19: mol_type = other RNA
aaatggacagtttataaag

SEQ ID NO: 9464 - RNA, 19 nt, synthetic construct
  source 1..19: mol_type = other RNA
taaatggacagtttataaa

SEQ ID NO: 9465 - RNA, 19 nt, synthetic construct
  source 1..19: mol_type = other RNA
ttaaatggacagtttataa

SEQ ID NO: 9466 - RNA, 19 nt, synthetic construct
  source 1..19: mol_type = other RNA
attaaatggacagtttata

SEQ ID NO: 9467 - RNA, 19 nt, synthetic construct
  source 1..19: mol_type = other RNA
gattaaatggacagtttat

SEQ ID NO: 9468 - RNA, 19 nt, synthetic construct
  source 1..19: mol_type = other RNA
agattaaatggacagttta

SEQ ID NO: 9469 - RNA, 19 nt, synthetic construct
  source 1..19: mol_type = other RNA
aagattaaatggacagttt

SEQ ID NO: 9470 - RNA, 19 nt, synthetic construct
  source 1..19: mol_type = other RNA
gaagattaaatggacagtt

SEQ ID NO: 9471 - RNA, 19 nt, synthetic construct
  source 1..19: mol_type = other RNA
tgaagattaaatggacagt

SEQ ID NO: 9472 - RNA, 19 nt, synthetic construct
  source 1..19: mol_type = other RNA
ctgaagattaaatggacag

SEQ ID NO: 9473 - RNA, 19 nt, synthetic construct
  source 1..19: mol_type = other RNA
gctgaagattaaatggaca

SEQ ID NO: 9474 - RNA, 19 nt, synthetic construct
  source 1..19: mol_type = other RNA
ggctgaagattaaatggac

SEQ ID NO: 9475 - RNA, 19 nt, synthetic construct
  source 1..19: mol_type = other RNA
tggctgaagattaaatgga

SEQ ID NO: 9476 - RNA, 19 nt, synthetic construct
  source 1..19: mol_type = other RNA
gtggctgaagattaaatgg

SEQ ID NO: 9477 - RNA, 19 nt, synthetic construct
  source 1..19: mol_type = other RNA
ggtggctgaagattaaatg

SEQ ID NO: 9478 - RNA, 19 nt, synthetic construct
  source 1..19: mol_type = other RNA
aggtggctgaagattaaat

SEQ ID NO: 9479 - RNA, 19 nt, synthetic construct
  source 1..19: mol_type = other RNA
gaggtggctgaagattaaa

SEQ ID NO: 9480 - RNA, 19 nt, synthetic construct
  source 1..19: mol_type = other RNA
ggaggtggctgaagattaa

SEQ ID NO: 9481 - RNA, 19 nt, synthetic construct
  source 1..19: mol_type = other RNA
tggaggtggctgaagatta

SEQ ID NO: 9482 - RNA, 19 nt, synthetic construct
  source 1..19: mol_type = other RNA
gtggaggtggctgaagatt

SEQ ID NO: 9483 - RNA, 19 nt, synthetic construct
  source 1..19: mol_type = other RNA
agtggaggtggctgaagat

SEQ ID NO: 9484 - RNA, 19 nt, synthetic construct
  source 1..19: mol_type = other RNA
cagtggaggtggctgaaga

SEQ ID NO: 9485 - RNA, 19 nt, synthetic construct
  source 1..19: mol_type = other RNA
ccagtggaggtggctgaag

SEQ ID NO: 9486 - RNA, 19 nt, synthetic construct
  source 1..19: mol_type = other RNA
cccagtggaggtggctgaa

SEQ ID NO: 9487 - RNA, 19 nt, synthetic construct
  source 1..19: mol_type = other RNA
ccccagtggaggtggctga

SEQ ID NO: 9488 - RNA, 19 nt, synthetic construct
  source 1..19: mol_type = other RNA
gccccagtggaggtggctg

SEQ ID NO: 9489 - RNA, 19 nt, synthetic construct
  source 1..19: mol_type = other RNA
tgccccagtggaggtggct

SEQ ID NO: 9490 - RNA, 19 nt, synthetic construct
  source 1..19: mol_type = other RNA
atgccccagtggaggtggc

SEQ ID NO: 9491 - RNA, 19 nt, synthetic construct
  source 1..19: mol_type = other RNA
gatgccccagtggaggtgg

SEQ ID NO: 9492 - RNA, 19 nt, synthetic construct
  source 1..19: mol_type = other RNA
agatgccccagtggaggtg

SEQ ID NO: 9493 - RNA, 19 nt, synthetic construct
  source 1..19: mol_type = other RNA
aagatgccccagtggaggt

SEQ ID NO: 9494 - RNA, 19 nt, synthetic construct
  source 1..19: mol_type = other RNA
gaagatgccccagtggagg

SEQ ID NO: 9495 - RNA, 19 nt, synthetic construct
  source 1..19: mol_type = other RNA
tgaagatgccccagtggag

SEQ ID NO: 9496 - RNA, 19 nt, synthetic construct
  source 1..19: mol_type = other RNA
gtgaagatgccccagtgga

SEQ ID NO: 9497 - RNA, 19 nt, synthetic construct
  source 1..19: mol_type = other RNA
tgtgaagatgccccagtgg

SEQ ID NO: 9498 - RNA, 19 nt, synthetic construct
  source 1..19: mol_type = other RNA
ctgtgaagatgccccagtg

SEQ ID NO: 9499 - RNA, 19 nt, synthetic construct
  source 1..19: mol_type = other RNA
tctgtgaagatgccccagt

SEQ ID NO: 9500 - RNA, 19 nt, synthetic construct
  source 1..19: mol_type = other RNA
ctctgtgaagatgccccag

SEQ ID NO: 9501 - RNA, 19 nt, synthetic construct
  source 1..19: mol_type = other RNA
tctctgtgaagatgcccca

SEQ ID NO: 9502 - RNA, 19 nt, synthetic construct
  source 1..19: mol_type = other RNA
atctctgtgaagatgcccc

SEQ ID NO: 9503 - RNA, 19 nt, synthetic construct
  source 1..19: mol_type = other RNA
aatctctgtgaagatgccc

SEQ ID NO: 9504 - RNA, 19 nt, synthetic construct
  source 1..19: mol_type = other RNA
gaatctctgtgaagatgcc

SEQ ID NO: 9505 - RNA, 19 nt, synthetic construct
  source 1..19: mol_type = other RNA
tgaatctctgtgaagatgc

SEQ ID NO: 9506 - RNA, 19 nt, synthetic construct
  source 1..19: mol_type = other RNA
ctgaatctctgtgaagatg

SEQ ID NO: 9507 - RNA, 19 nt, synthetic construct
  source 1..19: mol_type = other RNA
tctgaatctctgtgaagat

SEQ ID NO: 9508 - RNA, 19 nt, synthetic construct
  source 1..19: mol_type = other RNA
gtctgaatctctgtgaaga

SEQ ID NO: 9509 - RNA, 19 nt, synthetic construct
  source 1..19: mol_type = other RNA
agtctgaatctctgtgaag

SEQ ID NO: 9510 - RNA, 19 nt, synthetic construct
  source 1..19: mol_type = other RNA
cagtctgaatctctgtgaa

SEQ ID NO: 9511 - RNA, 19 nt, synthetic construct
  source 1..19: mol_type = other RNA
ccagtctgaatctctgtga

SEQ ID NO: 9512 - RNA, 19 nt, synthetic construct
  source 1..19: mol_type = other RNA
gccagtctgaatctctgtg

SEQ ID NO: 9513 - RNA, 19 nt, synthetic construct
  source 1..19: mol_type = other RNA
agccagtctgaatctctgt

SEQ ID NO: 9514 - RNA, 19 nt, synthetic construct
  source 1..19: mol_type = other RNA
gagccagtctgaatctctg

SEQ ID NO: 9515 - RNA, 19 nt, synthetic construct
  source 1..19: mol_type = other RNA
tgagccagtctgaatctct

SEQ ID NO: 9516 - RNA, 19 nt, synthetic construct
  source 1..19: mol_type = other RNA
ctgagccagtctgaatctc

SEQ ID NO: 9517 - RNA, 19 nt, synthetic construct
  source 1..19: mol_type = other RNA
tctgagccagtctgaatct

SEQ ID NO: 9518 - RNA, 19 nt, synthetic construct
  source 1..19: mol_type = other RNA
ctctgagccagtctgaatc

SEQ ID NO: 9519 - RNA, 19 nt, synthetic construct
  source 1..19: mol_type = other RNA
tctctgagccagtctgaat

SEQ ID NO: 9520 - RNA, 19 nt, synthetic construct
  source 1..19: mol_type = other RNA
gtctctgagccagtctgaa

SEQ ID NO: 9521 - RNA, 19 nt, synthetic construct
  source 1..19: mol_type = other RNA
tgtctctgagccagtctga

SEQ ID NO: 9522 - RNA, 19 nt, synthetic construct
  source 1..19: mol_type = other RNA
atgtctctgagccagtctg

SEQ ID NO: 9523 - RNA, 19 nt, synthetic construct
  source 1..19: mol_type = other RNA
aatgtctctgagccagtct

SEQ ID NO: 9524 - RNA, 19 nt, synthetic construct
  source 1..19: mol_type = other RNA
taatgtctctgagccagtc

SEQ ID NO: 9525 - RNA, 19 nt, synthetic construct
  source 1..19: mol_type = other RNA
ctaatgtctctgagccagt

SEQ ID NO: 9526 - RNA, 19 nt, synthetic construct
  source 1..19: mol_type = other RNA
actaatgtctctgagccag

SEQ ID NO: 9527 - RNA, 19 nt, synthetic construct
  source 1..19: mol_type = other RNA
tactaatgtctctgagcca

SEQ ID NO: 9528 - RNA, 19 nt, synthetic construct
  source 1..19: mol_type = other RNA
gtactaatgtctctgagcc

SEQ ID NO: 9529 - RNA, 19 nt, synthetic construct
  source 1..19: mol_type = other RNA
cgtactaatgtctctgagc

SEQ ID NO: 9530 - RNA, 19 nt, synthetic construct
  source 1..19: mol_type = other RNA
acgtactaatgtctctgag

SEQ ID NO: 9531 - RNA, 19 nt, synthetic construct
  source 1..19: mol_type = other RNA
cacgtactaatgtctctga

SEQ ID NO: 9532 - RNA, 19 nt, synthetic construct
  source 1..19: mol_type = other RNA
acacgtactaatgtctctg

SEQ ID NO: 9533 - RNA, 19 nt, synthetic construct
  source 1..19: mol_type = other RNA
gacacgtactaatgtctct

SEQ ID NO: 9534 - RNA, 19 nt, synthetic construct
  source 1..19: mol_type = other RNA
ggacacgtactaatgtctc

SEQ ID NO: 9535 - RNA, 19 nt, synthetic construct
  source 1..19: mol_type = other RNA
tggacacgtactaatgtct

SEQ ID NO: 9536 - RNA, 19 nt, synthetic construct
  source 1..19: mol_type = other RNA
ttggacacgtactaatgtc

SEQ ID NO: 9537 - RNA, 19 nt, synthetic construct
  source 1..19: mol_type = other RNA
tttggacacgtactaatgt

SEQ ID NO: 9538 - RNA, 19 nt, synthetic construct
  source 1..19: mol_type = other RNA
atttggacacgtactaatg

SEQ ID NO: 9539 - RNA, 19 nt, synthetic construct
  source 1..19: mol_type = other RNA
aatttggacacgtactaat

SEQ ID NO: 9540 - RNA, 19 nt, synthetic construct
  source 1..19: mol_type = other RNA
gaatttggacacgtactaa

SEQ ID NO: 9541 - RNA, 19 nt, synthetic construct
  source 1..19: mol_type = other RNA
cgaatttggacacgtacta

SEQ ID NO: 9542 - RNA, 19 nt, synthetic construct
  source 1..19: mol_type = other RNA
gcgaatttggacacgtact

SEQ ID NO: 9543 - RNA, 19 nt, synthetic construct
  source 1..19: mol_type = other RNA
ggcgaatttggacacgtac

SEQ ID NO: 9544 - RNA, 19 nt, synthetic construct
  source 1..19: mol_type = other RNA
tggcgaatttggacacgta

SEQ ID NO: 9545 - RNA, 19 nt, synthetic construct
  source 1..19: mol_type = other RNA
ttggcgaatttggacacgt

SEQ ID NO: 9546 - RNA, 19 nt, synthetic construct
  source 1..19: mol_type = other RNA
cttggcgaatttggacacg

SEQ ID NO: 9547 - RNA, 19 nt, synthetic construct
  source 1..19: mol_type = other RNA
gcttggcgaatttggacac

SEQ ID NO: 9548 - RNA, 19 nt, synthetic construct
  source 1..19: mol_type = other RNA
tgcttggcgaatttggaca

SEQ ID NO: 9549 - RNA, 19 nt, synthetic construct
  source 1..19: mol_type = other RNA
gtgcttggcgaatttggac

SEQ ID NO: 9550 - RNA, 19 nt, synthetic construct
  source 1..19: mol_type = other RNA
agtgcttggcgaatttgga

SEQ ID NO: 9551 - RNA, 19 nt, synthetic construct
  source 1..19: mol_type = other RNA
gagtgcttggcgaatttgg

SEQ ID NO: 9552 - RNA, 19 nt, synthetic construct
  source 1..19: mol_type = other RNA
ggagtgcttggcgaatttg

SEQ ID NO: 9553 - RNA, 19 nt, synthetic construct
  source 1..19: mol_type = other RNA
aggagtgcttggcgaattt

SEQ ID NO: 9554 - RNA, 19 nt, synthetic construct
  source 1..19: mol_type = other RNA
gaggagtgcttggcgaatt

SEQ ID NO: 9555 - RNA, 19 nt, synthetic construct
  source 1..19: mol_type = other RNA
ggaggagtgcttggcgaat

SEQ ID NO: 9556 - RNA, 19 nt, synthetic construct
  source 1..19: mol_type = other RNA
aggaggagtgcttggcgaa

SEQ ID NO: 9557 - RNA, 19 nt, synthetic construct
  source 1..19: mol_type = other RNA
taggaggagtgcttggcga

SEQ ID NO: 9558 - RNA, 19 nt, synthetic construct
  source 1..19: mol_type = other RNA
ctaggaggagtgcttggcg

SEQ ID NO: 9559 - RNA, 19 nt, synthetic construct
  source 1..19: mol_type = other RNA
gctaggaggagtgcttggc

SEQ ID NO: 9560 - RNA, 19 nt, synthetic construct
  source 1..19: mol_type = other RNA
tgctaggaggagtgcttgg

SEQ ID NO: 9561 - RNA, 19 nt, synthetic construct
  source 1..19: mol_type = other RNA
gtgctaggaggagtgcttg

SEQ ID NO: 9562 - RNA, 19 nt, synthetic construct
  source 1..19: mol_type = other RNA
tgtgctaggaggagtgctt

SEQ ID NO: 9563 - RNA, 19 nt, synthetic construct
  source 1..19: mol_type = other RNA
gtgtgctaggaggagtgct

SEQ ID NO: 9564 - RNA, 19 nt, synthetic construct
  source 1..19: mol_type = other RNA
ggtgtgctaggaggagtgc

SEQ ID NO: 9565 - RNA, 19 nt, synthetic construct
  source 1..19: mol_type = other RNA
gggtgtgctaggaggagtg

SEQ ID NO: 9566 - RNA, 19 nt, synthetic construct
  source 1..19: mol_type = other RNA
agggtgtgctaggaggagt

SEQ ID NO: 9567 - RNA, 19 nt, synthetic construct
  source 1..19: mol_type = other RNA
gagggtgtgctaggaggag

SEQ ID NO: 9568 - RNA, 19 nt, synthetic construct
  source 1..19: mol_type = other RNA
agagggtgtgctaggagga

SEQ ID NO: 9569 - RNA, 19 nt, synthetic construct
  source 1..19: mol_type = other RNA
gagagggtgtgctaggagg

SEQ ID NO: 9570 - RNA, 19 nt, synthetic construct
  source 1..19: mol_type = other RNA
ggagagggtgtgctaggag

SEQ ID NO: 9571 - RNA, 19 nt, synthetic construct
  source 1..19: mol_type = other RNA
tggagagggtgtgctagga

SEQ ID NO: 9572 - RNA, 19 nt, synthetic construct
  source 1..19: mol_type = other RNA
ttggagagggtgtgctagg

SEQ ID NO: 9573 - RNA, 19 nt, synthetic construct
  source 1..19: mol_type = other RNA
cttggagagggtgtgctag

SEQ ID NO: 9574 - RNA, 19 nt, synthetic construct
  source 1..19: mol_type = other RNA
ccttggagagggtgtgcta

SEQ ID NO: 9575 - RNA, 19 nt, synthetic construct
  source 1..19: mol_type = other RNA
cccttggagagggtgtgct

SEQ ID NO: 9576 - RNA, 19 nt, synthetic construct
  source 1..19: mol_type = other RNA
acccttggagagggtgtgc

SEQ ID NO: 9577 - RNA, 19 nt, synthetic construct
  source 1..19: mol_type = other RNA
tacccttggagagggtgtg

SEQ ID NO: 9578 - RNA, 19 nt, synthetic construct
  source 1..19: mol_type = other RNA
gtacccttggagagggtgt

SEQ ID NO: 9579 - RNA, 19 nt, synthetic construct
  source 1..19: mol_type = other RNA
ggtacccttggagagggtg

SEQ ID NO: 9580 - RNA, 19 nt, synthetic construct
  source 1..19: mol_type = other RNA
cggtacccttggagagggt

SEQ ID NO: 9581 - RNA, 19 nt, synthetic construct
  source 1..19: mol_type = other RNA
gcggtacccttggagaggg

SEQ ID NO: 9582 - RNA, 19 nt, synthetic construct
  source 1..19: mol_type = other RNA
cgcggtacccttggagagg

SEQ ID NO: 9583 - RNA, 19 nt, synthetic construct
  source 1..19: mol_type = other RNA
acgcggtacccttggagag

SEQ ID NO: 9584 - RNA, 19 nt, synthetic construct
  source 1..19: mol_type = other RNA
gacgcggtacccttggaga

SEQ ID NO: 9585 - RNA, 19 nt, synthetic construct
  source 1..19: mol_type = other RNA
cgacgcggtacccttggag

SEQ ID NO: 9586 - RNA, 19 nt, synthetic construct
  source 1..19: mol_type = other RNA
tcgacgcggtacccttgga

SEQ ID NO: 9587 - RNA, 19 nt, synthetic construct
  source 1..19: mol_type = other RNA
atcgacgcggtacccttgg

SEQ ID NO: 9588 - RNA, 19 nt, synthetic construct
  source 1..19: mol_type = other RNA
catcgacgcggtacccttg

SEQ ID NO: 9589 - RNA, 19 nt, synthetic construct
  source 1..19: mol_type = other RNA
gcatcgacgcggtaccctt

SEQ ID NO: 9590 - RNA, 19 nt, synthetic construct
  source 1..19: mol_type = other RNA
agcatcgacgcggtaccct

SEQ ID NO: 9591 - RNA, 19 nt, synthetic construct
  source 1..19: mol_type = other RNA
tagcatcgacgcggtaccc

SEQ ID NO: 9592 - RNA, 19 nt, synthetic construct
  source 1..19: mol_type = other RNA
atagcatcgacgcggtacc

SEQ ID NO: 9593 - RNA, 19 nt, synthetic construct
  source 1..19: mol_type = other RNA
catagcatcgacgcggtac

SEQ ID NO: 9594 - RNA, 19 nt, synthetic construct
  source 1..19: mol_type = other RNA
acatagcatcgacgcggta

SEQ ID NO: 9595 - RNA, 19 nt, synthetic construct
  source 1..19: mol_type = other RNA
cacatagcatcgacgcggt

SEQ ID NO: 9596 - RNA, 19 nt, synthetic construct
  source 1..19: mol_type = other RNA
gcacatagcatcgacgcgg

SEQ ID NO: 9597 - RNA, 19 nt, synthetic construct
  source 1..19: mol_type = other RNA
agcacatagcatcgacgcg

SEQ ID NO: 9598 - RNA, 19 nt, synthetic construct
  source 1..19: mol_type = other RNA
gagcacatagcatcgacgc

SEQ ID NO: 9599 - RNA, 19 nt, synthetic construct
  source 1..19: mol_type = other RNA
tgagcacatagcatcgacg

SEQ ID NO: 9600 - RNA, 19 nt, synthetic construct
  source 1..19: mol_type = other RNA
ctgagcacatagcatcgac

SEQ ID NO: 9601 - RNA, 19 nt, synthetic construct
  source 1..19: mol_type = other RNA
actgagcacatagcatcga

SEQ ID NO: 9602 - RNA, 19 nt, synthetic construct
  source 1..19: mol_type = other RNA
aactgagcacatagcatcg

SEQ ID NO: 9603 - RNA, 19 nt, synthetic construct
  source 1..19: mol_type = other RNA
gaactgagcacatagcatc

SEQ ID NO: 9604 - RNA, 19 nt, synthetic construct
  source 1..19: mol_type = other RNA
agaactgagcacatagcat

SEQ ID NO: 9605 - RNA, 19 nt, synthetic construct
  source 1..19: mol_type = other RNA
tagaactgagcacatagca

SEQ ID NO: 9606 - RNA, 19 nt, synthetic construct
  source 1..19: mol_type = other RNA
ctagaactgagcacatagc

SEQ ID NO: 9607 - RNA, 19 nt, synthetic construct
  source 1..19: mol_type = other RNA
actagaactgagcacatag

SEQ ID NO: 9608 - RNA, 19 nt, synthetic construct
  source 1..19: mol_type = other RNA
gactagaactgagcacata

SEQ ID NO: 9609 - RNA, 19 nt, synthetic construct
  source 1..19: mol_type = other RNA
tgactagaactgagcacat

SEQ ID NO: 9610 - RNA, 19 nt, synthetic construct
  source 1..19: mol_type = other RNA
ctgactagaactgagcaca

SEQ ID NO: 9611 - RNA, 19 nt, synthetic construct
  source 1..19: mol_type = other RNA
tctgactagaactgagcac

SEQ ID NO: 9612 - RNA, 19 nt, synthetic construct
  source 1..19: mol_type = other RNA
ttctgactagaactgagca

SEQ ID NO: 9613 - RNA, 19 nt, synthetic construct
  source 1..19: mol_type = other RNA
attctgactagaactgagc

SEQ ID NO: 9614 - RNA, 19 nt, synthetic construct
  source 1..19: mol_type = other RNA
tattctgactagaactgag

SEQ ID NO: 9615 - RNA, 19 nt, synthetic construct
  source 1..19: mol_type = other RNA
ttattctgactagaactga

SEQ ID NO: 9616 - RNA, 19 nt, synthetic construct
  source 1..19: mol_type = other RNA
attattctgactagaactg

SEQ ID NO: 9617 - RNA, 19 nt, synthetic construct
  source 1..19: mol_type = other RNA
gattattctgactagaact

SEQ ID NO: 9618 - RNA, 19 nt, synthetic construct
  source 1..19: mol_type = other RNA
agattattctgactagaac

SEQ ID NO: 9619 - RNA, 19 nt, synthetic construct
  source 1..19: mol_type = other RNA
aagattattctgactagaa

SEQ ID NO: 9620 - RNA, 19 nt, synthetic construct
  source 1..19: mol_type = other RNA
caagattattctgactaga

SEQ ID NO: 9621 - RNA, 19 nt, synthetic construct
  source 1..19: mol_type = other RNA
gcaagattattctgactag

SEQ ID NO: 9622 - RNA, 19 nt, synthetic construct
  source 1..19: mol_type = other RNA
agcaagattattctgacta

SEQ ID NO: 9623 - RNA, 19 nt, synthetic construct
  source 1..19: mol_type = other RNA
gagcaagattattctgact

SEQ ID NO: 9624 - RNA, 19 nt, synthetic construct
  source 1..19: mol_type = other RNA
tgagcaagattattctgac

SEQ ID NO: 9625 - RNA, 19 nt, synthetic construct
  source 1..19: mol_type = other RNA
atgagcaagattattctga

SEQ ID NO: 9626 - RNA, 19 nt, synthetic construct
  source 1..19: mol_type = other RNA
gatgagcaagattattctg

SEQ ID NO: 9627 - RNA, 19 nt, synthetic construct
  source 1..19: mol_type = other RNA
ggatgagcaagattattct

SEQ ID NO: 9628 - RNA, 19 nt, synthetic construct
  source 1..19: mol_type = other RNA
aggatgagcaagattattc

SEQ ID NO: 9629 - RNA, 19 nt, synthetic construct
  source 1..19: mol_type = other RNA
gaggatgagcaagattatt

SEQ ID NO: 9630 - RNA, 19 nt, synthetic construct
  source 1..19: mol_type = other RNA
ggaggatgagcaagattat

SEQ ID NO: 9631 - RNA, 19 nt, synthetic construct
  source 1..19: mol_type = other RNA
tggaggatgagcaagatta

SEQ ID NO: 9632 - RNA, 19 nt, synthetic construct
  source 1..19: mol_type = other RNA
ctggaggatgagcaagatt

SEQ ID NO: 9633 - RNA, 19 nt, synthetic construct
  source 1..19: mol_type = other RNA
gctggaggatgagcaagat

SEQ ID NO: 9634 - RNA, 19 nt, synthetic construct
  source 1..19: mol_type = other RNA
agctggaggatgagcaaga

SEQ ID NO: 9635 - RNA, 19 nt, synthetic construct
  source 1..19: mol_type = other RNA
gagctggaggatgagcaag

SEQ ID NO: 9636 - RNA, 19 nt, synthetic construct
  source 1..19: mol_type = other RNA
ggagctggaggatgagcaa

SEQ ID NO: 9637 - RNA, 19 nt, synthetic construct
  source 1..19: mol_type = other RNA
gggagctggaggatgagca

SEQ ID NO: 9638 - RNA, 19 nt, synthetic construct
  source 1..19: mol_type = other RNA
ggggagctggaggatgagc

SEQ ID NO: 9639 - RNA, 19 nt, synthetic construct
  source 1..19: mol_type = other RNA
gggggagctggaggatgag

SEQ ID NO: 9640 - RNA, 19 nt, synthetic construct
  source 1..19: mol_type = other RNA
agggggagctggaggatga

SEQ ID NO: 9641 - RNA, 19 nt, synthetic construct
  source 1..19: mol_type = other RNA
cagggggagctggaggatg

SEQ ID NO: 9642 - RNA, 19 nt, synthetic construct
  source 1..19: mol_type = other RNA
acagggggagctggaggat

SEQ ID NO: 9643 - RNA, 19 nt, synthetic construct
  source 1..19: mol_type = other RNA
aacagggggagctggagga

SEQ ID NO: 9644 - RNA, 19 nt, synthetic construct
  source 1..19: mol_type = other RNA
gaacagggggagctggagg

SEQ ID NO: 9645 - RNA, 19 nt, synthetic construct
  source 1..19: mol_type = other RNA
ggaacagggggagctggag

SEQ ID NO: 9646 - RNA, 19 nt, synthetic construct
  source 1..19: mol_type = other RNA
tggaacagggggagctgga

SEQ ID NO: 9647 - RNA, 19 nt, synthetic construct
  source 1..19: mol_type = other RNA
gtggaacagggggagctgg

SEQ ID NO: 9648 - RNA, 19 nt, synthetic construct
  source 1..19: mol_type = other RNA
ggtggaacagggggagctg

SEQ ID NO: 9649 - RNA, 19 nt, synthetic construct
  source 1..19: mol_type = other RNA
tggtggaacagggggagct

SEQ ID NO: 9650 - RNA, 19 nt, synthetic construct
  source 1..19: mol_type = other RNA
ttggtggaacagggggagc

SEQ ID NO: 9651 - RNA, 19 nt, synthetic construct
  source 1..19: mol_type = other RNA
cttggtggaacagggggag

SEQ ID NO: 9652 - RNA, 19 nt, synthetic construct
  source 1..19: mol_type = other RNA
ccttggtggaacaggggga

SEQ ID NO: 9653 - RNA, 19 nt, synthetic construct
  source 1..19: mol_type = other RNA
gccttggtggaacaggggg

SEQ ID NO: 9654 - RNA, 19 nt, synthetic construct
  source 1..19: mol_type = other RNA
tgccttggtggaacagggg

SEQ ID NO: 9655 - RNA, 19 nt, synthetic construct
  source 1..19: mol_type = other RNA
ctgccttggtggaacaggg

SEQ ID NO: 9656 - RNA, 19 nt, synthetic construct
  source 1..19: mol_type = other RNA
tctgccttggtggaacagg

SEQ ID NO: 9657 - RNA, 19 nt, synthetic construct
  source 1..19: mol_type = other RNA
ttctgccttggtggaacag

SEQ ID NO: 9658 - RNA, 19 nt, synthetic construct
  source 1..19: mol_type = other RNA
attctgccttggtggaaca

SEQ ID NO: 9659 - RNA, 19 nt, synthetic construct
  source 1..19: mol_type = other RNA
aattctgccttggtggaac

SEQ ID NO: 9660 - RNA, 19 nt, synthetic construct
  source 1..19: mol_type = other RNA
gaattctgccttggtggaa

SEQ ID NO: 9661 - RNA, 19 nt, synthetic construct
  source 1..19: mol_type = other RNA
tgaattctgccttggtgga

SEQ ID NO: 9662 - RNA, 19 nt, synthetic construct
  source 1..19: mol_type = other RNA
ttgaattctgccttggtgg

SEQ ID NO: 9663 - RNA, 19 nt, synthetic construct
  source 1..19: mol_type = other RNA
cttgaattctgccttggtg

SEQ ID NO: 9664 - RNA, 19 nt, synthetic construct
  source 1..19: mol_type = other RNA
gcttgaattctgccttggt

SEQ ID NO: 9665 - RNA, 19 nt, synthetic construct
  source 1..19: mol_type = other RNA
ggcttgaattctgccttgg

SEQ ID NO: 9666 - RNA, 19 nt, synthetic construct
  source 1..19: mol_type = other RNA
gggcttgaattctgccttg

SEQ ID NO: 9667 - RNA, 19 nt, synthetic construct
  source 1..19: mol_type = other RNA
agggcttgaattctgcctt

SEQ ID NO: 9668 - RNA, 19 nt, synthetic construct
  source 1..19: mol_type = other RNA
gagggcttgaattctgcct

SEQ ID NO: 9669 - RNA, 19 nt, synthetic construct
  source 1..19: mol_type = other RNA
tgagggcttgaattctgcc

SEQ ID NO: 9670 - RNA, 19 nt, synthetic construct
  source 1..19: mol_type = other RNA
atgagggcttgaattctgc

SEQ ID NO: 9671 - RNA, 19 nt, synthetic construct
  source 1..19: mol_type = other RNA
gatgagggcttgaattctg

SEQ ID NO: 9672 - RNA, 19 nt, synthetic construct
  source 1..19: mol_type = other RNA
agatgagggcttgaattct

SEQ ID NO: 9673 - RNA, 19 nt, synthetic construct
  source 1..19: mol_type = other RNA
cagatgagggcttgaattc

SEQ ID NO: 9674 - RNA, 19 nt, synthetic construct
  source 1..19: mol_type = other RNA
gcagatgagggcttgaatt

SEQ ID NO: 9675 - RNA, 19 nt, synthetic construct
  source 1..19: mol_type = other RNA
ggcagatgagggcttgaat

SEQ ID NO: 9676 - RNA, 19 nt, synthetic construct
  source 1..19: mol_type = other RNA
tggcagatgagggcttgaa

SEQ ID NO: 9677 - RNA, 19 nt, synthetic construct
  source 1..19: mol_type = other RNA
ttggcagatgagggcttga

SEQ ID NO: 9678 - RNA, 19 nt, synthetic construct
  source 1..19: mol_type = other RNA
tttggcagatgagggcttg

SEQ ID NO: 9679 - RNA, 19 nt, synthetic construct
  source 1..19: mol_type = other RNA
ttttggcagatgagggctt

SEQ ID NO: 9680 - RNA, 19 nt, synthetic construct
  source 1..19: mol_type = other RNA
gttttggcagatgagggct

SEQ ID NO: 9681 - RNA, 19 nt, synthetic construct
  source 1..19: mol_type = other RNA
agttttggcagatgagggc

SEQ ID NO: 9682 - RNA, 19 nt, synthetic construct
  source 1..19: mol_type = other RNA
cagttttggcagatgaggg

SEQ ID NO: 9683 - RNA, 19 nt, synthetic construct
  source 1..19: mol_type = other RNA
gcagttttggcagatgagg

SEQ ID NO: 9684 - RNA, 19 nt, synthetic construct
  source 1..19: mol_type = other RNA
ggcagttttggcagatgag

SEQ ID NO: 9685 - RNA, 19 nt, synthetic construct
  source 1..19: mol_type = other RNA
tggcagttttggcagatga

SEQ ID NO: 9686 - RNA, 19 nt, synthetic construct
  source 1..19: mol_type = other RNA
gtggcagttttggcagatg

SEQ ID NO: 9687 - RNA, 19 nt, synthetic construct
  source 1..19: mol_type = other RNA
ggtggcagttttggcagat

SEQ ID NO: 9688 - RNA, 19 nt, synthetic construct
  source 1..19: mol_type = other RNA
tggtggcagttttggcaga

SEQ ID NO: 9689 - RNA, 19 nt, synthetic construct
  source 1..19: mol_type = other RNA
ttggtggcagttttggcag

SEQ ID NO: 9690 - RNA, 19 nt, synthetic construct
  source 1..19: mol_type = other RNA
tttggtggcagttttggca

SEQ ID NO: 9691 - RNA, 19 nt, synthetic construct
  source 1..19: mol_type = other RNA
ctttggtggcagttttggc

SEQ ID NO: 9692 - RNA, 19 nt, synthetic construct
  source 1..19: mol_type = other RNA
tctttggtggcagttttgg

SEQ ID NO: 9693 - RNA, 19 nt, synthetic construct
  source 1..19: mol_type = other RNA
gtctttggtggcagttttg

SEQ ID NO: 9694 - RNA, 19 nt, synthetic construct
  source 1..19: mol_type = other RNA
agtctttggtggcagtttt

SEQ ID NO: 9695 - RNA, 19 nt, synthetic construct
  source 1..19: mol_type = other RNA
aagtctttggtggcagttt

SEQ ID NO: 9696 - RNA, 19 nt, synthetic construct
  source 1..19: mol_type = other RNA
taagtctttggtggcagtt

SEQ ID NO: 9697 - RNA, 19 nt, synthetic construct
  source 1..19: mol_type = other RNA
gtaagtctttggtggcagt

SEQ ID NO: 9698 - RNA, 19 nt, synthetic construct
  source 1..19: mol_type = other RNA
tgtaagtctttggtggcag

SEQ ID NO: 9699 - RNA, 19 nt, synthetic construct
  source 1..19: mol_type = other RNA
ttgtaagtctttggtggca

SEQ ID NO: 9700 - RNA, 19 nt, synthetic construct
  source 1..19: mol_type = other RNA
tttgtaagtctttggtggc

SEQ ID NO: 9701 - RNA, 19 nt, synthetic construct
  source 1..19: mol_type = other RNA
gtttgtaagtctttggtgg

SEQ ID NO: 9702 - RNA, 19 nt, synthetic construct
  source 1..19: mol_type = other RNA
cgtttgtaagtctttggtg

SEQ ID NO: 9703 - RNA, 19 nt, synthetic construct
  source 1..19: mol_type = other RNA
ccgtttgtaagtctttggt

SEQ ID NO: 9704 - RNA, 19 nt, synthetic construct
  source 1..19: mol_type = other RNA
cccgtttgtaagtctttgg

SEQ ID NO: 9705 - RNA, 19 nt, synthetic construct
  source 1..19: mol_type = other RNA
tcccgtttgtaagtctttg

SEQ ID NO: 9706 - RNA, 19 nt, synthetic construct
  source 1..19: mol_type = other RNA
ctcccgtttgtaagtcttt

SEQ ID NO: 9707 - RNA, 19 nt, synthetic construct
  source 1..19: mol_type = other RNA
gctcccgtttgtaagtctt

SEQ ID NO: 9708 - RNA, 19 nt, synthetic construct
  source 1..19: mol_type = other RNA
agctcccgtttgtaagtct

SEQ ID NO: 9709 - RNA, 19 nt, synthetic construct
  source 1..19: mol_type = other RNA
aagctcccgtttgtaagtc

SEQ ID NO: 9710 - RNA, 19 nt, synthetic construct
  source 1..19: mol_type = other RNA
aaagctcccgtttgtaagt

SEQ ID NO: 9711 - RNA, 19 nt, synthetic construct
  source 1..19: mol_type = other RNA
gaaagctcccgtttgtaag

SEQ ID NO: 9712 - RNA, 19 nt, synthetic construct
  source 1..19: mol_type = other RNA
cgaaagctcccgtttgtaa

SEQ ID NO: 9713 - RNA, 19 nt, synthetic construct
  source 1..19: mol_type = other RNA
gcgaaagctcccgtttgta

SEQ ID NO: 9714 - RNA, 19 nt, synthetic construct
  source 1..19: mol_type = other RNA
tgcgaaagctcccgtttgt

SEQ ID NO: 9715 - RNA, 19 nt, synthetic construct
  source 1..19: mol_type = other RNA
gtgcgaaagctcccgtttg

SEQ ID NO: 9716 - RNA, 19 nt, synthetic construct
  source 1..19: mol_type = other RNA
ggtgcgaaagctcccgttt

SEQ ID NO: 9717 - RNA, 19 nt, synthetic construct
  source 1..19: mol_type = other RNA
gggtgcgaaagctcccgtt

SEQ ID NO: 9718 - RNA, 19 nt, synthetic construct
  source 1..19: mol_type = other RNA
ggggtgcgaaagctcccgt

SEQ ID NO: 9719 - RNA, 19 nt, synthetic construct
  source 1..19: mol_type = other RNA
gggggtgcgaaagctcccg

SEQ ID NO: 9720 - RNA, 19 nt, synthetic construct
  source 1..19: mol_type = other RNA
ggggggtgcgaaagctccc

SEQ ID NO: 9721 - RNA, 19 nt, synthetic construct
  source 1..19: mol_type = other RNA
tggggggtgcgaaagctcc

SEQ ID NO: 9722 - RNA, 19 nt, synthetic construct
  source 1..19: mol_type = other RNA
atggggggtgcgaaagctc

SEQ ID NO: 9723 - RNA, 19 nt, synthetic construct
  source 1..19: mol_type = other RNA
aatggggggtgcgaaagct

SEQ ID NO: 9724 - RNA, 19 nt, synthetic construct
  source 1..19: mol_type = other RNA
caatggggggtgcgaaagc

SEQ ID NO: 9725 - RNA, 19 nt, synthetic construct
  source 1..19: mol_type = other RNA
acaatggggggtgcgaaag

SEQ ID NO: 9726 - RNA, 19 nt, synthetic construct
  source 1..19: mol_type = other RNA
tacaatggggggtgcgaaa

SEQ ID NO: 9727 - RNA, 19 nt, synthetic construct
  source 1..19: mol_type = other RNA
gtacaatggggggtgcgaa

SEQ ID NO: 9728 - RNA, 19 nt, synthetic construct
  source 1..19: mol_type = other RNA
tgtacaatggggggtgcga

SEQ ID NO: 9729 - RNA, 19 nt, synthetic construct
  source 1..19: mol_type = other RNA
ctgtacaatggggggtgcg

SEQ ID NO: 9730 - RNA, 19 nt, synthetic construct
  source 1..19: mol_type = other RNA
tctgtacaatggggggtgc

SEQ ID NO: 9731 - RNA, 19 nt, synthetic construct
  source 1..19: mol_type = other RNA
gtctgtacaatggggggtg

SEQ ID NO: 9732 - RNA, 19 nt, synthetic construct
  source 1..19: mol_type = other RNA
agtctgtacaatggggggt

SEQ ID NO: 9733 - RNA, 19 nt, synthetic construct
  source 1..19: mol_type = other RNA
cagtctgtacaatgggggg

SEQ ID NO: 9734 - RNA, 19 nt, synthetic construct
  source 1..19: mol_type = other RNA
gcagtctgtacaatggggg

SEQ ID NO: 9735 - RNA, 19 nt, synthetic construct
  source 1..19: mol_type = other RNA
ggcagtctgtacaatgggg

SEQ ID NO: 9736 - RNA, 19 nt, synthetic construct
  source 1..19: mol_type = other RNA
aggcagtctgtacaatggg

SEQ ID NO: 9737 - RNA, 19 nt, synthetic construct
  source 1..19: mol_type = other RNA
aaggcagtctgtacaatgg

SEQ ID NO: 9738 - RNA, 19 nt, synthetic construct
  source 1..19: mol_type = other RNA
aaaggcagtctgtacaatg

SEQ ID NO: 9739 - RNA, 19 nt, synthetic construct
  source 1..19: mol_type = other RNA
caaaggcagtctgtacaat

SEQ ID NO: 9740 - RNA, 19 nt, synthetic construct
  source 1..19: mol_type = other RNA
gcaaaggcagtctgtacaa

SEQ ID NO: 9741 - RNA, 19 nt, synthetic construct
  source 1..19: mol_type = other RNA
agcaaaggcagtctgtaca

SEQ ID NO: 9742 - RNA, 19 nt, synthetic construct
  source 1..19: mol_type = other RNA
tagcaaaggcagtctgtac

SEQ ID NO: 9743 - RNA, 19 nt, synthetic construct
  source 1..19: mol_type = other RNA
ctagcaaaggcagtctgta

SEQ ID NO: 9744 - RNA, 19 nt, synthetic construct
  source 1..19: mol_type = other RNA
tctagcaaaggcagtctgt

SEQ ID NO: 9745 - RNA, 19 nt, synthetic construct
  source 1..19: mol_type = other RNA
ttctagcaaaggcagtctg

SEQ ID NO: 9746 - RNA, 19 nt, synthetic construct
  source 1..19: mol_type = other RNA
tttctagcaaaggcagtct

SEQ ID NO: 9747 - RNA, 19 nt, synthetic construct
  source 1..19: mol_type = other RNA
ttttctagcaaaggcagtc

SEQ ID NO: 9748 - RNA, 19 nt, synthetic construct
  source 1..19: mol_type = other RNA
attttctagcaaaggcagt

SEQ ID NO: 9749 - RNA, 19 nt, synthetic construct
  source 1..19: mol_type = other RNA
cattttctagcaaaggcag

SEQ ID NO: 9750 - RNA, 19 nt, synthetic construct
  source 1..19: mol_type = other RNA
gcattttctagcaaaggca

SEQ ID NO: 9751 - RNA, 19 nt, synthetic construct
  source 1..19: mol_type = other RNA
tgcattttctagcaaaggc

SEQ ID NO: 9752 - RNA, 19 nt, synthetic construct
  source 1..19: mol_type = other RNA
ctgcattttctagcaaagg

SEQ ID NO: 9753 - RNA, 19 nt, synthetic construct
  source 1..19: mol_type = other RNA
tctgcattttctagcaaag

SEQ ID NO: 9754 - RNA, 19 nt, synthetic construct
  source 1..19: mol_type = other RNA
ttctgcattttctagcaaa

SEQ ID NO: 9755 - RNA, 19 nt, synthetic construct
  source 1..19: mol_type = other RNA
tttctgcattttctagcaa

SEQ ID NO: 9756 - RNA, 19 nt, synthetic construct
  source 1..19: mol_type = other RNA
gtttctgcattttctagca

SEQ ID NO: 9757 - RNA, 19 nt, synthetic construct
  source 1..19: mol_type = other RNA
agtttctgcattttctagc

SEQ ID NO: 9758 - RNA, 19 nt, synthetic construct
  source 1..19: mol_type = other RNA
gagtttctgcattttctag

SEQ ID NO: 9759 - RNA, 19 nt, synthetic construct
  source 1..19: mol_type = other RNA
ggagtttctgcattttcta

SEQ ID NO: 9760 - RNA, 19 nt, synthetic construct
  source 1..19: mol_type = other RNA
gggagtttctgcattttct

SEQ ID NO: 9761 - RNA, 19 nt, synthetic construct
  source 1..19: mol_type = other RNA
ggggagtttctgcattttc

SEQ ID NO: 9762 - RNA, 19 nt, synthetic construct
  source 1..19: mol_type = other RNA
tggggagtttctgcatttt

SEQ ID NO: 9763 - RNA, 19 nt, synthetic construct
  source 1..19: mol_type = other RNA
ttggggagtttctgcattt

SEQ ID NO: 9764 - RNA, 19 nt, synthetic construct
  source 1..19: mol_type = other RNA
attggggagtttctgcatt

SEQ ID NO: 9765 - RNA, 19 nt, synthetic construct
  source 1..19: mol_type = other RNA
cattggggagtttctgcat

SEQ ID NO: 9766 - RNA, 19 nt, synthetic construct
  source 1..19: mol_type = other RNA
tcattggggagtttctgca

SEQ ID NO: 9767 - RNA, 19 nt, synthetic construct
  source 1..19: mol_type = other RNA
gtcattggggagtttctgc

SEQ ID NO: 9768 - RNA, 19 nt, synthetic construct
  source 1..19: mol_type = other RNA
ggtcattggggagtttctg

SEQ ID NO: 9769 - RNA, 19 nt, synthetic construct
  source 1..19: mol_type = other RNA
aggtcattggggagtttct

SEQ ID NO: 9770 - RNA, 19 nt, synthetic construct
  source 1..19: mol_type = other RNA
aaggtcattggggagtttc

SEQ ID NO: 9771 - RNA, 19 nt, synthetic construct
  source 1..19: mol_type = other RNA
taaggtcattggggagttt

SEQ ID NO: 9772 - RNA, 19 nt, synthetic construct
  source 1..19: mol_type = other RNA
ctaaggtcattggggagtt

SEQ ID NO: 9773 - RNA, 19 nt, synthetic construct
  source 1..19: mol_type = other RNA
gctaaggtcattggggagt

SEQ ID NO: 9774 - RNA, 19 nt, synthetic construct
  source 1..19: mol_type = other RNA
ggctaaggtcattggggag

SEQ ID NO: 9775 - RNA, 19 nt, synthetic construct
  source 1..19: mol_type = other RNA
tggctaaggtcattgggga

SEQ ID NO: 9776 - RNA, 19 nt, synthetic construct
  source 1..19: mol_type = other RNA
atggctaaggtcattgggg

SEQ ID NO: 9777 - RNA, 19 nt, synthetic construct
  source 1..19: mol_type = other RNA
tatggctaaggtcattggg

SEQ ID NO: 9778 - RNA, 19 nt, synthetic construct
  source 1..19: mol_type = other RNA
atatggctaaggtcattgg

SEQ ID NO: 9779 - RNA, 19 nt, synthetic construct
  source 1..19: mol_type = other RNA
catatggctaaggtcattg

SEQ ID NO: 9780 - RNA, 19 nt, synthetic construct
  source 1..19: mol_type = other RNA
acatatggctaaggtcatt

SEQ ID NO: 9781 - RNA, 19 nt, synthetic construct
  source 1..19: mol_type = other RNA
tacatatggctaaggtcat

SEQ ID NO: 9782 - RNA, 19 nt, synthetic construct
  source 1..19: mol_type = other RNA
ctacatatggctaaggtca

SEQ ID NO: 9783 - RNA, 19 nt, synthetic construct
  source 1..19: mol_type = other RNA
actacatatggctaaggtc

SEQ ID NO: 9784 - RNA, 19 nt, synthetic construct
  source 1..19: mol_type = other RNA
gactacatatggctaaggt

SEQ ID NO: 9785 - RNA, 19 nt, synthetic construct
  source 1..19: mol_type = other RNA
tgactacatatggctaagg

SEQ ID NO: 9786 - RNA, 19 nt, synthetic construct
  source 1..19: mol_type = other RNA
atgactacatatggctaag

SEQ ID NO: 9787 - RNA, 19 nt, synthetic construct
  source 1..19: mol_type = other RNA
aatgactacatatggctaa

SEQ ID NO: 9788 - RNA, 19 nt, synthetic construct
  source 1..19: mol_type = other RNA
caatgactacatatggcta

SEQ ID NO: 9789 - RNA, 19 nt, synthetic construct
  source 1..19: mol_type = other RNA
tcaatgactacatatggct

SEQ ID NO: 9790 - RNA, 19 nt, synthetic construct
  source 1..19: mol_type = other RNA
gtcaatgactacatatggc

SEQ ID NO: 9791 - RNA, 19 nt, synthetic construct
  source 1..19: mol_type = other RNA
tgtcaatgactacatatgg

SEQ ID NO: 9792 - RNA, 19 nt, synthetic construct
  source 1..19: mol_type = other RNA
gtgtcaatgactacatatg

SEQ ID NO: 9793 - RNA, 19 nt, synthetic construct
  source 1..19: mol_type = other RNA
agtgtcaatgactacatat

SEQ ID NO: 9794 - RNA, 19 nt, synthetic construct
  source 1..19: mol_type = other RNA
cagtgtcaatgactacata

SEQ ID NO: 9795 - RNA, 19 nt, synthetic construct
  source 1..19: mol_type = other RNA
ccagtgtcaatgactacat

SEQ ID NO: 9796 - RNA, 19 nt, synthetic construct
  source 1..19: mol_type = other RNA
tccagtgtcaatgactaca

SEQ ID NO: 9797 - RNA, 19 nt, synthetic construct
  source 1..19: mol_type = other RNA
ttccagtgtcaatgactac

SEQ ID NO: 9798 - RNA, 19 nt, synthetic construct
  source 1..19: mol_type = other RNA
attccagtgtcaatgacta

SEQ ID NO: 9799 - RNA, 19 nt, synthetic construct
  source 1..19: mol_type = other RNA
cattccagtgtcaatgact

SEQ ID NO: 9800 - RNA, 19 nt, synthetic construct
  source 1..19: mol_type = other RNA
ccattccagtgtcaatgac

SEQ ID NO: 9801 - RNA, 19 nt, synthetic construct
  source 1..19: mol_type = other RNA
accattccagtgtcaatga

SEQ ID NO: 9802 - RNA, 19 nt, synthetic construct
  source 1..19: mol_type = other RNA
taccattccagtgtcaatg

SEQ ID NO: 9803 - RNA, 19 nt, synthetic construct
  source 1..19: mol_type = other RNA
ataccattccagtgtcaat

SEQ ID NO: 9804 - RNA, 19 nt, synthetic construct
  source 1..19: mol_type = other RNA
aataccattccagtgtcaa

SEQ ID NO: 9805 - RNA, 19 nt, synthetic construct
  source 1..19: mol_type = other RNA
aaataccattccagtgtca

SEQ ID NO: 9806 - RNA, 19 nt, synthetic construct
  source 1..19: mol_type = other RNA
caaataccattccagtgtc

SEQ ID NO: 9807 - RNA, 19 nt, synthetic construct
  source 1..19: mol_type = other RNA
acaaataccattccagtgt

SEQ ID NO: 9808 - RNA, 19 nt, synthetic construct
  source 1..19: mol_type = other RNA
tacaaataccattccagtg

SEQ ID NO: 9809 - RNA, 19 nt, synthetic construct
  source 1..19: mol_type = other RNA
ttacaaataccattccagt

SEQ ID NO: 9810 - RNA, 19 nt, synthetic construct
  source 1..19: mol_type = other RNA
tttacaaataccattccag

SEQ ID NO: 9811 - RNA, 19 nt, synthetic construct
  source 1..19: mol_type = other RNA
ctttacaaataccattcca

SEQ ID NO: 9812 - RNA, 19 nt, synthetic construct
  source 1..19: mol_type = other RNA
actttacaaataccattcc

SEQ ID NO: 9813 - RNA, 19 nt, synthetic construct
  source 1..19: mol_type = other RNA
aactttacaaataccattc

SEQ ID NO: 9814 - RNA, 19 nt, synthetic construct
  source 1..19: mol_type = other RNA
aaactttacaaataccatt

SEQ ID NO: 9815 - RNA, 19 nt, synthetic construct
  source 1..19: mol_type = other RNA
aaaactttacaaataccat

SEQ ID NO: 9816 - RNA, 19 nt, synthetic construct
  source 1..19: mol_type = other RNA
aaaaactttacaaatacca

SEQ ID NO: 9817 - RNA, 19 nt, synthetic construct
  source 1..19: mol_type = other RNA
aaaaaactttacaaatacc

SEQ ID NO: 9818 - RNA, 19 nt, synthetic construct
  source 1..19: mol_type = other RNA
aaaaaaactttacaaatac

SEQ ID NO: 9819 - RNA, 19 nt, synthetic construct
  source 1..19: mol_type = other RNA
aaaaaaaactttacaaata

SEQ ID NO: 9820 - RNA, 19 nt, synthetic construct
  source 1..19: mol_type = other RNA
aaaaaaaaactttacaaat

SEQ ID NO: 9821 - RNA, 19 nt, synthetic construct
  source 1..19: mol_type = other RNA
aaaaaaaaaactttacaaa

SEQ ID NO: 9822 - RNA, 19 nt, synthetic construct
  source 1..19: mol_type = other RNA
taaaaaaaaaactttacaa

SEQ ID NO: 9823 - RNA, 19 nt, synthetic construct
  source 1..19: mol_type = other RNA
ttaaaaaaaaaactttaca

SEQ ID NO: 9824 - RNA, 19 nt, synthetic construct
  source 1..19: mol_type = other RNA
attaaaaaaaaaactttac

SEQ ID NO: 9825 - RNA, 19 nt, synthetic construct
  source 1..19: mol_type = other RNA
aattaaaaaaaaaacttta

SEQ ID NO: 9826 - RNA, 19 nt, synthetic construct
  source 1..19: mol_type = other RNA
aaattaaaaaaaaaacttt

SEQ ID NO: 9827 - RNA, 19 nt, synthetic construct
  source 1..19: mol_type = other RNA
taaattaaaaaaaaaactt

SEQ ID NO: 9828 - RNA, 19 nt, synthetic construct
  source 1..19: mol_type = other RNA
ataaattaaaaaaaaaact

SEQ ID NO: 9829 - RNA, 19 nt, synthetic construct
  source 1..19: mol_type = other RNA
aataaattaaaaaaaaaac

SEQ ID NO: 9830 - RNA, 19 nt, synthetic construct
  source 1..19: mol_type = other RNA
gaataaattaaaaaaaaaa

SEQ ID NO: 9831 - RNA, 19 nt, synthetic construct
  source 1..19: mol_type = other RNA
tgaataaattaaaaaaaaa

SEQ ID NO: 9832 - RNA, 19 nt, synthetic construct
  source 1..19: mol_type = other RNA
ttgaataaattaaaaaaaa

SEQ ID NO: 9833 - RNA, 19 nt, synthetic construct
  source 1..19: mol_type = other RNA
tttgaataaattaaaaaaa

SEQ ID NO: 9834 - RNA, 19 nt, synthetic construct
  source 1..19: mol_type = other RNA
ttttgaataaattaaaaaa

SEQ ID NO: 9835 - RNA, 19 nt, synthetic construct
  source 1..19: mol_type = other RNA
tttttgaataaattaaaaa

SEQ ID NO: 9836 - RNA, 19 nt, synthetic construct
  source 1..19: mol_type = other RNA
ttttttgaataaattaaaa

SEQ ID NO: 9837 - RNA, 19 nt, synthetic construct
  source 1..19: mol_type = other RNA
tttttttgaataaattaaa

SEQ ID NO: 9838 - RNA, 19 nt, synthetic construct
  source 1..19: mol_type = other RNA
ctttttttgaataaattaa

SEQ ID NO: 9839 - RNA, 19 nt, synthetic construct
  source 1..19: mol_type = other RNA
tctttttttgaataaatta

SEQ ID NO: 9840 - RNA, 19 nt, synthetic construct
  source 1..19: mol_type = other RNA
gtctttttttgaataaatt

SEQ ID NO: 9841 - RNA, 19 nt, synthetic construct
  source 1..19: mol_type = other RNA
tgtctttttttgaataaat

SEQ ID NO: 9842 - RNA, 19 nt, synthetic construct
  source 1..19: mol_type = other RNA
atgtctttttttgaataaa

SEQ ID NO: 9843 - RNA, 19 nt, synthetic construct
  source 1..19: mol_type = other RNA
tatgtctttttttgaataa

SEQ ID NO: 9844 - RNA, 19 nt, synthetic construct
  source 1..19: mol_type = other RNA
ctatgtctttttttgaata

SEQ ID NO: 9845 - RNA, 19 nt, synthetic construct
  source 1..19: mol_type = other RNA
actatgtctttttttgaat

SEQ ID NO: 9846 - RNA, 19 nt, synthetic construct
  source 1..19: mol_type = other RNA
tactatgtctttttttgaa

SEQ ID NO: 9847 - RNA, 19 nt, synthetic construct
  source 1..19: mol_type = other RNA
atactatgtctttttttga

SEQ ID NO: 9848 - RNA, 19 nt, synthetic construct
  source 1..19: mol_type = other RNA
aatactatgtctttttttg

SEQ ID NO: 9849 - RNA, 19 nt, synthetic construct
  source 1..19: mol_type = other RNA
aaatactatgtcttttttt

SEQ ID NO: 9850 - RNA, 19 nt, synthetic construct
  source 1..19: mol_type = other RNA
aaaatactatgtctttttt

SEQ ID NO: 9851 - RNA, 19 nt, synthetic construct
  source 1..19: mol_type = other RNA
taaaatactatgtcttttt

SEQ ID NO: 9852 - RNA, 19 nt, synthetic construct
  source 1..19: mol_type = other RNA
ctaaaatactatgtctttt

SEQ ID NO: 9853 - RNA, 19 nt, synthetic construct
  source 1..19: mol_type = other RNA
actaaaatactatgtcttt

SEQ ID NO: 9854 - RNA, 19 nt, synthetic construct
  source 1..19: mol_type = other RNA
tactaaaatactatgtctt

SEQ ID NO: 9855 - RNA, 19 nt, synthetic construct
  source 1..19: mol_type = other RNA
gtactaaaatactatgtct

SEQ ID NO: 9856 - RNA, 19 nt, synthetic construct
  source 1..19: mol_type = other RNA
agtactaaaatactatgtc

SEQ ID NO: 9857 - RNA, 19 nt, synthetic construct
  source 1..19: mol_type = other RNA
aagtactaaaatactatgt

SEQ ID NO: 9858 - RNA, 19 nt, synthetic construct
  source 1..19: mol_type = other RNA
aaagtactaaaatactatg

SEQ ID NO: 9859 - RNA, 19 nt, synthetic construct
  source 1..19: mol_type = other RNA
aaaagtactaaaatactat

SEQ ID NO: 9860 - RNA, 19 nt, synthetic construct
  source 1..19: mol_type = other RNA
aaaaagtactaaaatacta

SEQ ID NO: 9861 - RNA, 19 nt, synthetic construct
  source 1..19: mol_type = other RNA
taaaaagtactaaaatact

SEQ ID NO: 9862 - RNA, 19 nt, synthetic construct
  source 1..19: mol_type = other RNA
gtaaaaagtactaaaatac

SEQ ID NO: 9863 - RNA, 19 nt, synthetic construct
  source 1..19: mol_type = other RNA
tgtaaaaagtactaaaata

SEQ ID NO: 9864 - RNA, 19 nt, synthetic construct
  source 1..19: mol_type = other RNA
ttgtaaaaagtactaaaat

SEQ ID NO: 9865 - RNA, 19 nt, synthetic construct
  source 1..19: mol_type = other RNA
tttgtaaaaagtactaaaa

SEQ ID NO: 9866 - RNA, 19 nt, synthetic construct
  source 1..19: mol_type = other RNA
atttgtaaaaagtactaaa

SEQ ID NO: 9867 - RNA, 19 nt, synthetic construct
  source 1..19: mol_type = other RNA
tatttgtaaaaagtactaa

SEQ ID NO: 9868 - RNA, 19 nt, synthetic construct
  source 1..19: mol_type = other RNA
ttatttgtaaaaagtacta

SEQ ID NO: 9869 - RNA, 19 nt, synthetic construct
  source 1..19: mol_type = other RNA
attatttgtaaaaagtact

SEQ ID NO: 9870 - RNA, 19 nt, synthetic construct
  source 1..19: mol_type = other RNA
cattatttgtaaaaagtac

SEQ ID NO: 9871 - RNA, 19 nt, synthetic construct
  source 1..19: mol_type = other RNA
gcattatttgtaaaaagta

SEQ ID NO: 9872 - RNA, 19 nt, synthetic construct
  source 1..19: mol_type = other RNA
agcattatttgtaaaaagt

SEQ ID NO: 9873 - RNA, 19 nt, synthetic construct
  source 1..19: mol_type = other RNA
gagcattatttgtaaaaag

SEQ ID NO: 9874 - RNA, 19 nt, synthetic construct
  source 1..19: mol_type = other RNA
agagcattatttgtaaaaa

SEQ ID NO: 9875 - RNA, 19 nt, synthetic construct
  source 1..19: mol_type = other RNA
aagagcattatttgtaaaa

SEQ ID NO: 9876 - RNA, 19 nt, synthetic construct
  source 1..19: mol_type = other RNA
taagagcattatttgtaaa

SEQ ID NO: 9877 - RNA, 19 nt, synthetic construct
  source 1..19: mol_type = other RNA
gtaagagcattatttgtaa

SEQ ID NO: 9878 - RNA, 19 nt, synthetic construct
  source 1..19: mol_type = other RNA
tgtaagagcattatttgta

SEQ ID NO: 9879 - RNA, 19 nt, synthetic construct
  source 1..19: mol_type = other RNA
ttgtaagagcattatttgt

SEQ ID NO: 9880 - RNA, 19 nt, synthetic construct
  source 1..19: mol_type = other RNA
tttgtaagagcattatttg

SEQ ID NO: 9881 - RNA, 19 nt, synthetic construct
  source 1..19: mol_type = other RNA
ttttgtaagagcattattt

SEQ ID NO: 9882 - RNA, 19 nt, synthetic construct
  source 1..19: mol_type = other RNA
tttttgtaagagcattatt

SEQ ID NO: 9883 - RNA, 19 nt, synthetic construct
  source 1..19: mol_type = other RNA
atttttgtaagagcattat

SEQ ID NO: 9884 - RNA, 19 nt, synthetic construct
  source 1..19: mol_type = other RNA
catttttgtaagagcatta

SEQ ID NO: 9885 - RNA, 19 nt, synthetic construct
  source 1..19: mol_type = other RNA
gcatttttgtaagagcatt

SEQ ID NO: 9886 - RNA, 19 nt, synthetic construct
  source 1..19: mol_type = other RNA
agcatttttgtaagagcat

SEQ ID NO: 9887 - RNA, 19 nt, synthetic construct
  source 1..19: mol_type = other RNA
tagcatttttgtaagagca

SEQ ID NO: 9888 - RNA, 19 nt, synthetic construct
  source 1..19: mol_type = other RNA
gtagcatttttgtaagagc

SEQ ID NO: 9889 - RNA, 19 nt, synthetic construct
  source 1..19: mol_type = other RNA
agtagcatttttgtaagag

SEQ ID NO: 9890 - RNA, 19 nt, synthetic construct
  source 1..19: mol_type = other RNA
cagtagcatttttgtaaga

SEQ ID NO: 9891 - RNA, 19 nt, synthetic construct
  source 1..19: mol_type = other RNA
tcagtagcatttttgtaag

SEQ ID NO: 9892 - RNA, 19 nt, synthetic construct
  source 1..19: mol_type = other RNA
atcagtagcatttttgtaa

SEQ ID NO: 9893 - RNA, 19 nt, synthetic construct
  source 1..19: mol_type = other RNA
gatcagtagcatttttgta

SEQ ID NO: 9894 - RNA, 19 nt, synthetic construct
  source 1..19: mol_type = other RNA
tgatcagtagcatttttgt

SEQ ID NO: 9895 - RNA, 19 nt, synthetic construct
  source 1..19: mol_type = other RNA
ttgatcagtagcatttttg

SEQ ID NO: 9896 - RNA, 19 nt, synthetic construct
  source 1..19: mol_type = other RNA
tttgatcagtagcattttt

SEQ ID NO: 9897 - RNA, 19 nt, synthetic construct
  source 1..19: mol_type = other RNA
atttgatcagtagcatttt

SEQ ID NO: 9898 - RNA, 19 nt, synthetic construct
  source 1..19: mol_type = other RNA
tatttgatcagtagcattt

SEQ ID NO: 9899 - RNA, 19 nt, synthetic construct
  source 1..19: mol_type = other RNA
ttatttgatcagtagcatt

SEQ ID NO: 9900 - RNA, 19 nt, synthetic construct
  source 1..19: mol_type = other RNA
cttatttgatcagtagcat

SEQ ID NO: 9901 - RNA, 19 nt, synthetic construct
  source 1..19: mol_type = other RNA
gcttatttgatcagtagca

SEQ ID NO: 9902 - RNA, 19 nt, synthetic construct
  source 1..19: mol_type = other RNA
agcttatttgatcagtagc

SEQ ID NO: 9903 - RNA, 19 nt, synthetic construct
  source 1..19: mol_type = other RNA
aagcttatttgatcagtag

SEQ ID NO: 9904 - RNA, 19 nt, synthetic construct
  source 1..19: mol_type = other RNA
aaagcttatttgatcagta

SEQ ID NO: 9905 - RNA, 19 nt, synthetic construct
  source 1..19: mol_type = other RNA
aaaagcttatttgatcagt

SEQ ID NO: 9906 - RNA, 19 nt, synthetic construct
  source 1..19: mol_type = other RNA
taaaagcttatttgatcag

SEQ ID NO: 9907 - RNA, 19 nt, synthetic construct
  source 1..19: mol_type = other RNA
ttaaaagcttatttgatca

SEQ ID NO: 9908 - RNA, 19 nt, synthetic construct
  source 1..19: mol_type = other RNA
cttaaaagcttatttgatc

SEQ ID NO: 9909 - RNA, 19 nt, synthetic construct
  source 1..19: mol_type = other RNA
tcttaaaagcttatttgat

SEQ ID NO: 9910 - RNA, 19 nt, synthetic construct
  source 1..19: mol_type = other RNA
ttcttaaaagcttatttga

SEQ ID NO: 9911 - RNA, 19 nt, synthetic construct
  source 1..19: mol_type = other RNA
attcttaaaagcttatttg

SEQ ID NO: 9912 - RNA, 19 nt, synthetic construct
  source 1..19: mol_type = other RNA
aattcttaaaagcttattt

SEQ ID NO: 9913 - RNA, 19 nt, synthetic construct
  source 1..19: mol_type = other RNA
caattcttaaaagcttatt

SEQ ID NO: 9914 - RNA, 19 nt, synthetic construct
  source 1..19: mol_type = other RNA
ccaattcttaaaagcttat

SEQ ID NO: 9915 - RNA, 19 nt, synthetic construct
  source 1..19: mol_type = other RNA
tccaattcttaaaagctta

SEQ ID NO: 9916 - RNA, 19 nt, synthetic construct
  source 1..19: mol_type = other RNA
ttccaattcttaaaagctt

SEQ ID NO: 9917 - RNA, 19 nt, synthetic construct
  source 1..19: mol_type = other RNA
tttccaattcttaaaagct

SEQ ID NO: 9918 - RNA, 19 nt, synthetic construct
  source 1..19: mol_type = other RNA
ttttccaattcttaaaagc

SEQ ID NO: 9919 - RNA, 19 nt, synthetic construct
  source 1..19: mol_type = other RNA
tttttccaattcttaaaag

SEQ ID NO: 9920 - RNA, 19 nt, synthetic construct
  source 1..19: mol_type = other RNA
atttttccaattcttaaaa

SEQ ID NO: 9921 - RNA, 19 nt, synthetic construct
  source 1..19: mol_type = other RNA
tatttttccaattcttaaa

SEQ ID NO: 9922 - RNA, 19 nt, synthetic construct
  source 1..19: mol_type = other RNA
ttatttttccaattcttaa

SEQ ID NO: 9923 - RNA, 19 nt, synthetic construct
  source 1..19: mol_type = other RNA
tttatttttccaattctta

SEQ ID NO: 9924 - RNA, 19 nt, synthetic construct
  source 1..19: mol_type = other RNA
ttttatttttccaattctt

SEQ ID NO: 9925 - RNA, 19 nt, synthetic construct
  source 1..19: mol_type = other RNA
tttttatttttccaattct

SEQ ID NO: 9926 - RNA, 19 nt, synthetic construct
  source 1..19: mol_type = other RNA
atttttatttttccaattc

SEQ ID NO: 9927 - RNA, 19 nt, synthetic construct
  source 1..19: mol_type = other RNA
tatttttatttttccaatt

SEQ ID NO: 9928 - RNA, 19 nt, synthetic construct
  source 1..19: mol_type = other RNA
gtatttttatttttccaat

SEQ ID NO: 9929 - RNA, 19 nt, synthetic construct
  source 1..19: mol_type = other RNA
tgtatttttatttttccaa

SEQ ID NO: 9930 - RNA, 19 nt, synthetic construct
  source 1..19: mol_type = other RNA
ttgtatttttatttttcca

SEQ ID NO: 9931 - RNA, 19 nt, synthetic construct
  source 1..19: mol_type = other RNA
tttgtatttttatttttcc

SEQ ID NO: 9932 - RNA, 19 nt, synthetic construct
  source 1..19: mol_type = other RNA
ttttgtatttttatttttc

SEQ ID NO: 9933 - RNA, 19 nt, synthetic construct
  source 1..19: mol_type = other RNA
cttttgtatttttattttt

SEQ ID NO: 9934 - RNA, 19 nt, synthetic construct
  source 1..19: mol_type = other RNA
acttttgtatttttatttt

SEQ ID NO: 9935 - RNA, 19 nt, synthetic construct
  source 1..19: mol_type = other RNA
gacttttgtatttttattt

SEQ ID NO: 9936 - RNA, 19 nt, synthetic construct
  source 1..19: mol_type = other RNA
ggacttttgtatttttatt

SEQ ID NO: 9937 - RNA, 19 nt, synthetic construct
  source 1..19: mol_type = other RNA
aggacttttgtatttttat

SEQ ID NO: 9938 - RNA, 19 nt, synthetic construct
  source 1..19: mol_type = other RNA
aaggacttttgtattttta

SEQ ID NO: 9939 - RNA, 19 nt, synthetic construct
  source 1..19: mol_type = other RNA
gaaggacttttgtattttt

SEQ ID NO: 9940 - RNA, 19 nt, synthetic construct
  source 1..19: mol_type = other RNA
tgaaggacttttgtatttt

SEQ ID NO: 9941 - RNA, 19 nt, synthetic construct
  source 1..19: mol_type = other RNA
gtgaaggacttttgtattt

SEQ ID NO: 9942 - RNA, 19 nt, synthetic construct
  source 1..19: mol_type = other RNA
ggtgaaggacttttgtatt

SEQ ID NO: 9943 - RNA, 19 nt, synthetic construct
  source 1..19: mol_type = other RNA
tggtgaaggacttttgtat

SEQ ID NO: 9944 - RNA, 19 nt, synthetic construct
  source 1..19: mol_type = other RNA
atggtgaaggacttttgta

SEQ ID NO: 9945 - RNA, 19 nt, synthetic construct
  source 1..19: mol_type = other RNA
aatggtgaaggacttttgt

SEQ ID NO: 9946 - RNA, 19 nt, synthetic construct
  source 1..19: mol_type = other RNA
taatggtgaaggacttttg

SEQ ID NO: 9947 - RNA, 19 nt, synthetic construct
  source 1..19: mol_type = other RNA
ataatggtgaaggactttt

SEQ ID NO: 9948 - RNA, 19 nt, synthetic construct
  source 1..19: mol_type = other RNA
gataatggtgaaggacttt

SEQ ID NO: 9949 - RNA, 19 nt, synthetic construct
  source 1..19: mol_type = other RNA
ggataatggtgaaggactt

SEQ ID NO: 9950 - RNA, 19 nt, synthetic construct
  source 1..19: mol_type = other RNA
aggataatggtgaaggact

SEQ ID NO: 9951 - RNA, 19 nt, synthetic construct
  source 1..19: mol_type = other RNA
gaggataatggtgaaggac

SEQ ID NO: 9952 - RNA, 19 nt, synthetic construct
  source 1..19: mol_type = other RNA
tgaggataatggtgaagga

SEQ ID NO: 9953 - RNA, 19 nt, synthetic construct
  source 1..19: mol_type = other RNA
ctgaggataatggtgaagg

SEQ ID NO: 9954 - RNA, 19 nt, synthetic construct
  source 1..19: mol_type = other RNA
cctgaggataatggtgaag

SEQ ID NO: 9955 - RNA, 19 nt, synthetic construct
  source 1..19: mol_type = other RNA
acctgaggataatggtgaa

SEQ ID NO: 9956 - RNA, 19 nt, synthetic construct
  source 1..19: mol_type = other RNA
cacctgaggataatggtga

SEQ ID NO: 9957 - RNA, 19 nt, synthetic construct
  source 1..19: mol_type = other RNA
tcacctgaggataatggtg

SEQ ID NO: 9958 - RNA, 19 nt, synthetic construct
  source 1..19: mol_type = other RNA
atcacctgaggataatggt

SEQ ID NO: 9959 - RNA, 19 nt, synthetic construct
  source 1..19: mol_type = other RNA
gatcacctgaggataatgg

SEQ ID NO: 9960 - RNA, 19 nt, synthetic construct
  source 1..19: mol_type = other RNA
tgatcacctgaggataatg

SEQ ID NO: 9961 - RNA, 19 nt, synthetic construct
  source 1..19: mol_type = other RNA
ctgatcacctgaggataat

SEQ ID NO: 9962 - RNA, 19 nt, synthetic construct
  source 1..19: mol_type = other RNA
actgatcacctgaggataa

SEQ ID NO: 9963 - RNA, 19 nt, synthetic construct
  source 1..19: mol_type = other RNA
tactgatcacctgaggata

SEQ ID NO: 9964 - RNA, 19 nt, synthetic construct
  source 1..19: mol_type = other RNA
ctactgatcacctgaggat

SEQ ID NO: 9965 - RNA, 19 nt, synthetic construct
  source 1..19: mol_type = other RNA
gctactgatcacctgagga

SEQ ID NO: 9966 - RNA, 19 nt, synthetic construct
  source 1..19: mol_type = other RNA
tgctactgatcacctgagg

SEQ ID NO: 9967 - RNA, 19 nt, synthetic construct
  source 1..19: mol_type = other RNA
atgctactgatcacctgag

SEQ ID NO: 9968 - RNA, 19 nt, synthetic construct
  source 1..19: mol_type = other RNA
aatgctactgatcacctga

SEQ ID NO: 9969 - RNA, 19 nt, synthetic construct
  source 1..19: mol_type = other RNA
caatgctactgatcacctg

SEQ ID NO: 9970 - RNA, 19 nt, synthetic construct
  source 1..19: mol_type = other RNA
gcaatgctactgatcacct

SEQ ID NO: 9971 - RNA, 19 nt, synthetic construct
  source 1..19: mol_type = other RNA
ggcaatgctactgatcacc

SEQ ID NO: 9972 - RNA, 19 nt, synthetic construct
  source 1..19: mol_type = other RNA
aggcaatgctactgatcac

SEQ ID NO: 9973 - RNA, 19 nt, synthetic construct
  source 1..19: mol_type = other RNA
aaggcaatgctactgatca

SEQ ID NO: 9974 - RNA, 19 nt, synthetic construct
  source 1..19: mol_type = other RNA
caaggcaatgctactgatc

SEQ ID NO: 9975 - RNA, 19 nt, synthetic construct
  source 1..19: mol_type = other RNA
acaaggcaatgctactgat

SEQ ID NO: 9976 - RNA, 19 nt, synthetic construct
  source 1..19: mol_type = other RNA
gacaaggcaatgctactga

SEQ ID NO: 9977 - RNA, 19 nt, synthetic construct
  source 1..19: mol_type = other RNA
agacaaggcaatgctactg

SEQ ID NO: 9978 - RNA, 19 nt, synthetic construct
  source 1..19: mol_type = other RNA
aagacaaggcaatgctact

SEQ ID NO: 9979 - RNA, 19 nt, synthetic construct
  source 1..19: mol_type = other RNA
caagacaaggcaatgctac

SEQ ID NO: 9980 - RNA, 19 nt, synthetic construct
  source 1..19: mol_type = other RNA
ccaagacaaggcaatgcta

SEQ ID NO: 9981 - RNA, 19 nt, synthetic construct
  source 1..19: mol_type = other RNA
tccaagacaaggcaatgct

SEQ ID NO: 9982 - RNA, 19 nt, synthetic construct
  source 1..19: mol_type = other RNA
atccaagacaaggcaatgc

SEQ ID NO: 9983 - RNA, 19 nt, synthetic construct
  source 1..19: mol_type = other RNA
gatccaagacaaggcaatg

SEQ ID NO: 9984 - RNA, 19 nt, synthetic construct
  source 1..19: mol_type = other RNA
ggatccaagacaaggcaat

SEQ ID NO: 9985 - RNA, 19 nt, synthetic construct
  source 1..19: mol_type = other RNA
aggatccaagacaaggcaa

SEQ ID NO: 9986 - RNA, 19 nt, synthetic construct
  source 1..19: mol_type = other RNA
gaggatccaagacaaggca

SEQ ID NO: 9987 - RNA, 19 nt, synthetic construct
  source 1..19: mol_type = other RNA
tgaggatccaagacaaggc

SEQ ID NO: 9988 - RNA, 19 nt, synthetic construct
  source 1..19: mol_type = other RNA
ctgaggatccaagacaagg

SEQ ID NO: 9989 - RNA, 19 nt, synthetic construct
  source 1..19: mol_type = other RNA
actgaggatccaagacaag

SEQ ID NO: 9990 - RNA, 19 nt, synthetic construct
  source 1..19: mol_type = other RNA
cactgaggatccaagacaa

SEQ ID NO: 9991 - RNA, 19 nt, synthetic construct
  source 1..19: mol_type = other RNA
gcactgaggatccaagaca

SEQ ID NO: 9992 - RNA, 19 nt, synthetic construct
  source 1..19: mol_type = other RNA
agcactgaggatccaagac

SEQ ID NO: 9993 - RNA, 19 nt, synthetic construct
  source 1..19: mol_type = other RNA
cagcactgaggatccaaga

SEQ ID NO: 9994 - RNA, 19 nt, synthetic construct
  source 1..19: mol_type = other RNA
gcagcactgaggatccaag

SEQ ID NO: 9995 - RNA, 19 nt, synthetic construct
  source 1..19: mol_type = other RNA
ggcagcactgaggatccaa

SEQ ID NO: 9996 - RNA, 19 nt, synthetic construct
  source 1..19: mol_type = other RNA
tggcagcactgaggatcca

SEQ ID NO: 9997 - RNA, 19 nt, synthetic construct
  source 1..19: mol_type = other RNA
ttggcagcactgaggatcc

SEQ ID NO: 9998 - RNA, 19 nt, synthetic construct
  source 1..19: mol_type = other RNA
tttggcagcactgaggatc

SEQ ID NO: 9999 - RNA, 19 nt, synthetic construct
  source 1..19: mol_type = other RNA
ttttggcagcactgaggat

SEQ ID NO: 10000 - RNA, 19 nt, synthetic construct
  source 1..19: mol_type = other RNA
cttttggcagcactgagga

SEQ ID NO: 10001 - RNA, 19 nt, synthetic construct
  source 1..19: mol_type = other RNA
ccttttggcagcactgagg

SEQ ID NO: 10002 - RNA, 19 nt, synthetic construct
  source 1..19: mol_type = other RNA
gccttttggcagcactgag

SEQ ID NO: 10003 - RNA, 19 nt, synthetic construct
  source 1..19: mol_type = other RNA
ggccttttggcagcactga

SEQ ID NO: 10004 - RNA, 19 nt, synthetic construct
  source 1..19: mol_type = other RNA
tggccttttggcagcactg

SEQ ID NO: 10005 - RNA, 19 nt, synthetic construct
  source 1..19: mol_type = other RNA
ctggccttttggcagcact

SEQ ID NO: 10006 - RNA, 19 nt, synthetic construct
  source 1..19: mol_type = other RNA
actggccttttggcagcac

SEQ ID NO: 10007 - RNA, 19 nt, synthetic construct
  source 1..19: mol_type = other RNA
tactggccttttggcagca

SEQ ID NO: 10008 - RNA, 19 nt, synthetic construct
  source 1..19: mol_type = other RNA
atactggccttttggcagc

SEQ ID NO: 10009 - RNA, 19 nt, synthetic construct
  source 1..19: mol_type = other RNA
tatactggccttttggcag

SEQ ID NO: 10010 - RNA, 19 nt, synthetic construct
  source 1..19: mol_type = other RNA
ttatactggccttttggca

SEQ ID NO: 10011 - RNA, 19 nt, synthetic construct
  source 1..19: mol_type = other RNA
tttatactggccttttggc

SEQ ID NO: 10012 - RNA, 19 nt, synthetic construct
  source 1..19: mol_type = other RNA
ctttatactggccttttgg

SEQ ID NO: 10013 - RNA, 19 nt, synthetic construct
  source 1..19: mol_type = other RNA
tctttatactggccttttg

SEQ ID NO: 10014 - RNA, 19 nt, synthetic construct
  source 1..19: mol_type = other RNA
ttctttatactggcctttt

SEQ ID NO: 10015 - RNA, 19 nt, synthetic construct
  source 1..19: mol_type = other RNA
attctttatactggccttt

SEQ ID NO: 10016 - RNA, 19 nt, synthetic construct
  source 1..19: mol_type = other RNA
aattctttatactggcctt

SEQ ID NO: 10017 - RNA, 19 nt, synthetic construct
  source 1..19: mol_type = other RNA
aaattctttatactggcct

SEQ ID NO: 10018 - RNA, 19 nt, synthetic construct
  source 1..19: mol_type = other RNA
taaattctttatactggcc

SEQ ID NO: 10019 - RNA, 19 nt, synthetic construct
  source 1..19: mol_type = other RNA
ataaattctttatactggc

SEQ ID NO: 10020 - RNA, 19 nt, synthetic construct
  source 1..19: mol_type = other RNA
tataaattctttatactgg

SEQ ID NO: 10021 - RNA, 19 nt, synthetic construct
  source 1..19: mol_type = other RNA
atataaattctttatactg

SEQ ID NO: 10022 - RNA, 19 nt, synthetic construct
  source 1..19: mol_type = other RNA
aatataaattctttatact

SEQ ID NO: 10023 - RNA, 19 nt, synthetic construct
  source 1..19: mol_type = other RNA
aaatataaattctttatac

SEQ ID NO: 10024 - RNA, 19 nt, synthetic construct
  source 1..19: mol_type = other RNA
caaatataaattctttata

SEQ ID NO: 10025 - RNA, 19 nt, synthetic construct
  source 1..19: mol_type = other RNA
gcaaatataaattctttat

SEQ ID NO: 10026 - RNA, 19 nt, synthetic construct
  source 1..19: mol_type = other RNA
tgcaaatataaattcttta

SEQ ID NO: 10027 - RNA, 19 nt, synthetic construct
  source 1..19: mol_type = other RNA
gtgcaaatataaattcttt

SEQ ID NO: 10028 - RNA, 19 nt, synthetic construct
  source 1..19: mol_type = other RNA
agtgcaaatataaattctt

SEQ ID NO: 10029 - RNA, 19 nt, synthetic construct
  source 1..19: mol_type = other RNA
cagtgcaaatataaattct

SEQ ID NO: 10030 - RNA, 19 nt, synthetic construct
  source 1..19: mol_type = other RNA
acagtgcaaatataaattc

SEQ ID NO: 10031 - RNA, 19 nt, synthetic construct
  source 1..19: mol_type = other RNA
tacagtgcaaatataaatt

SEQ ID NO: 10032 - RNA, 19 nt, synthetic construct
  source 1..19: mol_type = other RNA
ttacagtgcaaatataaat

SEQ ID NO: 10033 - RNA, 19 nt, synthetic construct
  source 1..19: mol_type = other RNA
tttacagtgcaaatataaa

SEQ ID NO: 10034 - RNA, 19 nt, synthetic construct
  source 1..19: mol_type = other RNA
gtttacagtgcaaatataa

SEQ ID NO: 10035 - RNA, 19 nt, synthetic construct
  source 1..19: mol_type = other RNA
agtttacagtgcaaatata

SEQ ID NO: 10036 - RNA, 19 nt, synthetic construct
  source 1..19: mol_type = other RNA
gagtttacagtgcaaatat

SEQ ID NO: 10037 - RNA, 19 nt, synthetic construct
  source 1..19: mol_type = other RNA
agagtttacagtgcaaata

SEQ ID NO: 10038 - RNA, 19 nt, synthetic construct
  source 1..19: mol_type = other RNA
cagagtttacagtgcaaat

SEQ ID NO: 10039 - RNA, 19 nt, synthetic construct
  source 1..19: mol_type = other RNA
gcagagtttacagtgcaaa

SEQ ID NO: 10040 - RNA, 19 nt, synthetic construct
  source 1..19: mol_type = other RNA
tgcagagtttacagtgcaa

SEQ ID NO: 10041 - RNA, 19 nt, synthetic construct
  source 1..19: mol_type = other RNA
ttgcagagtttacagtgca

SEQ ID NO: 10042 - RNA, 19 nt, synthetic construct
  source 1..19: mol_type = other RNA
tttgcagagtttacagtgc

SEQ ID NO: 10043 - RNA, 19 nt, synthetic construct
  source 1..19: mol_type = other RNA
ttttgcagagtttacagtg

SEQ ID NO: 10044 - RNA, 19 nt, synthetic construct
  source 1..19: mol_type = other RNA
tttttgcagagtttacagt

SEQ ID NO: 10045 - RNA, 19 nt, synthetic construct
  source 1..19: mol_type = other RNA
atttttgcagagtttacag

SEQ ID NO: 10046 - RNA, 19 nt, synthetic construct
  source 1..19: mol_type = other RNA
tatttttgcagagtttaca

SEQ ID NO: 10047 - RNA, 19 nt, synthetic construct
  source 1..19: mol_type = other RNA
atatttttgcagagtttac

SEQ ID NO: 10048 - RNA, 19 nt, synthetic construct
  source 1..19: mol_type = other RNA
catatttttgcagagttta

SEQ ID NO: 10049 - RNA, 19 nt, synthetic construct
  source 1..19: mol_type = other RNA
ccatatttttgcagagttt

SEQ ID NO: 10050 - RNA, 19 nt, synthetic construct
  source 1..19: mol_type = other RNA
accatatttttgcagagtt

SEQ ID NO: 10051 - RNA, 19 nt, synthetic construct
  source 1..19: mol_type = other RNA
aaccatatttttgcagagt

SEQ ID NO: 10052 - RNA, 19 nt, synthetic construct
  source 1..19: mol_type = other RNA
aaaccatatttttgcagag

SEQ ID NO: 10053 - RNA, 19 nt, synthetic construct
  source 1..19: mol_type = other RNA
taaaccatatttttgcaga

SEQ ID NO: 10054 - RNA, 19 nt, synthetic construct
  source 1..19: mol_type = other RNA
ttaaaccatatttttgcag

SEQ ID NO: 10055 - RNA, 19 nt, synthetic construct
  source 1..19: mol_type = other RNA
tttaaaccatatttttgca

SEQ ID NO: 10056 - RNA, 19 nt, synthetic construct
  source 1..19: mol_type = other RNA
ctttaaaccatatttttgc

SEQ ID NO: 10057 - RNA, 19 nt, synthetic construct
  source 1..19: mol_type = other RNA
actttaaaccatatttttg

SEQ ID NO: 10058 - RNA, 19 nt, synthetic construct
  source 1..19: mol_type = other RNA
cactttaaaccatattttt

SEQ ID NO: 10059 - RNA, 19 nt, synthetic construct
  source 1..19: mol_type = other RNA
tcactttaaaccatatttt

SEQ ID NO: 10060 - RNA, 19 nt, synthetic construct
  source 1..19: mol_type = other RNA
gtcactttaaaccatattt

SEQ ID NO: 10061 - RNA, 19 nt, synthetic construct
  source 1..19: mol_type = other RNA
tgtcactttaaaccatatt

SEQ ID NO: 10062 - RNA, 19 nt, synthetic construct
  source 1..19: mol_type = other RNA
atgtcactttaaaccatat

SEQ ID NO: 10063 - RNA, 19 nt, synthetic construct
  source 1..19: mol_type = other RNA
catgtcactttaaaccata

SEQ ID NO: 10064 - RNA, 19 nt, synthetic construct
  source 1..19: mol_type = other RNA
tcatgtcactttaaaccat

SEQ ID NO: 10065 - RNA, 19 nt, synthetic construct
  source 1..19: mol_type = other RNA
atcatgtcactttaaacca

SEQ ID NO: 10066 - RNA, 19 nt, synthetic construct
  source 1..19: mol_type = other RNA
aatcatgtcactttaaacc

SEQ ID NO: 10067 - RNA, 19 nt, synthetic construct
  source 1..19: mol_type = other RNA
caatcatgtcactttaaac

SEQ ID NO: 10068 - RNA, 19 nt, synthetic construct
  source 1..19: mol_type = other RNA
gcaatcatgtcactttaaa

SEQ ID NO: 10069 - RNA, 19 nt, synthetic construct
  source 1..19: mol_type = other RNA
tgcaatcatgtcactttaa

SEQ ID NO: 10070 - RNA, 19 nt, synthetic construct
  source 1..19: mol_type = other RNA
gtgcaatcatgtcacttta

SEQ ID NO: 10071 - RNA, 19 nt, synthetic construct
  source 1..19: mol_type = other RNA
agtgcaatcatgtcacttt

SEQ ID NO: 10072 - RNA, 19 nt, synthetic construct
  source 1..19: mol_type = other RNA
cagtgcaatcatgtcactt

SEQ ID NO: 10073 - RNA, 19 nt, synthetic construct
  source 1..19: mol_type = other RNA
tcagtgcaatcatgtcact

SEQ ID NO: 10074 - RNA, 19 nt, synthetic construct
  source 1..19: mol_type = other RNA
ttcagtgcaatcatgtcac

SEQ ID NO: 10075 - RNA, 19 nt, synthetic construct
  source 1..19: mol_type = other RNA
tttcagtgcaatcatgtca

SEQ ID NO: 10076 - RNA, 19 nt, synthetic construct
  source 1..19: mol_type = other RNA
ttttcagtgcaatcatgtc

SEQ ID NO: 10077 - RNA, 19 nt, synthetic construct
  source 1..19: mol_type = other RNA
cttttcagtgcaatcatgt

SEQ ID NO: 10078 - RNA, 19 nt, synthetic construct
  source 1..19: mol_type = other RNA
ccttttcagtgcaatcatg

SEQ ID NO: 10079 - RNA, 19 nt, synthetic construct
  source 1..19: mol_type = other RNA
cccttttcagtgcaatcat

SEQ ID NO: 10080 - RNA, 19 nt, synthetic construct
  source 1..19: mol_type = other RNA
tcccttttcagtgcaatca

SEQ ID NO: 10081 - RNA, 19 nt, synthetic construct
  source 1..19: mol_type = other RNA
atcccttttcagtgcaatc

SEQ ID NO: 10082 - RNA, 19 nt, synthetic construct
  source 1..19: mol_type = other RNA
tatcccttttcagtgcaat

SEQ ID NO: 10083 - RNA, 19 nt, synthetic construct
  source 1..19: mol_type = other RNA
ctatcccttttcagtgcaa

SEQ ID NO: 10084 - RNA, 19 nt, synthetic construct
  source 1..19: mol_type = other RNA
actatcccttttcagtgca

SEQ ID NO: 10085 - RNA, 19 nt, synthetic construct
  source 1..19: mol_type = other RNA
cactatcccttttcagtgc

SEQ ID NO: 10086 - RNA, 19 nt, synthetic construct
  source 1..19: mol_type = other RNA
gcactatcccttttcagtg

SEQ ID NO: 10087 - RNA, 19 nt, synthetic construct
  source 1..19: mol_type = other RNA
agcactatcccttttcagt

SEQ ID NO: 10088 - RNA, 19 nt, synthetic construct
  source 1..19: mol_type = other RNA
aagcactatcccttttcag

SEQ ID NO: 10089 - RNA, 19 nt, synthetic construct
  source 1..19: mol_type = other RNA
aaagcactatcccttttca

SEQ ID NO: 10090 - RNA, 19 nt, synthetic construct
  source 1..19: mol_type = other RNA
aaaagcactatcccttttc

SEQ ID NO: 10091 - RNA, 19 nt, synthetic construct
  source 1..19: mol_type = other RNA
caaaagcactatccctttt

SEQ ID NO: 10092 - RNA, 19 nt, synthetic construct
  source 1..19: mol_type = other RNA
acaaaagcactatcccttt

SEQ ID NO: 10093 - RNA, 19 nt, synthetic construct
  source 1..19: mol_type = other RNA
cacaaaagcactatccctt

SEQ ID NO: 10094 - RNA, 19 nt, synthetic construct
  source 1..19: mol_type = other RNA
tcacaaaagcactatccct

SEQ ID NO: 10095 - RNA, 19 nt, synthetic construct
  source 1..19: mol_type = other RNA
ttcacaaaagcactatccc

SEQ ID NO: 10096 - RNA, 19 nt, synthetic construct
  source 1..19: mol_type = other RNA
tttcacaaaagcactatcc

SEQ ID NO: 10097 - RNA, 19 nt, synthetic construct
  source 1..19: mol_type = other RNA
atttcacaaaagcactatc

SEQ ID NO: 10098 - RNA, 19 nt, synthetic construct
  source 1..19: mol_type = other RNA
aatttcacaaaagcactat

SEQ ID NO: 10099 - RNA, 19 nt, synthetic construct
  source 1..19: mol_type = other RNA
aaatttcacaaaagcacta

SEQ ID NO: 10100 - RNA, 19 nt, synthetic construct
  source 1..19: mol_type = other RNA
aaaatttcacaaaagcact

SEQ ID NO: 10101 - RNA, 19 nt, synthetic construct
  source 1..19: mol_type = other RNA
aaaaatttcacaaaagcac

SEQ ID NO: 10102 - RNA, 19 nt, synthetic construct
  source 1..19: mol_type = other RNA
gaaaaatttcacaaaagca

SEQ ID NO: 10103 - RNA, 19 nt, synthetic construct
  source 1..19: mol_type = other RNA
tgaaaaatttcacaaaagc

SEQ ID NO: 10104 - RNA, 19 nt, synthetic construct
  source 1..19: mol_type = other RNA
ttgaaaaatttcacaaaag

SEQ ID NO: 10105 - RNA, 19 nt, synthetic construct
  source 1..19: mol_type = other RNA
tttgaaaaatttcacaaaa

SEQ ID NO: 10106 - RNA, 19 nt, synthetic construct
  source 1..19: mol_type = other RNA
atttgaaaaatttcacaaa

SEQ ID NO: 10107 - RNA, 19 nt, synthetic construct
  source 1..19: mol_type = other RNA
aatttgaaaaatttcacaa

SEQ ID NO: 10108 - RNA, 19 nt, synthetic construct
  source 1..19: mol_type = other RNA
aaatttgaaaaatttcaca

SEQ ID NO: 10109 - RNA, 19 nt, synthetic construct
  source 1..19: mol_type = other RNA
caaatttgaaaaatttcac

SEQ ID NO: 10110 - RNA, 19 nt, synthetic construct
  source 1..19: mol_type = other RNA
tcaaatttgaaaaatttca

SEQ ID NO: 10111 - RNA, 19 nt, synthetic construct
  source 1..19: mol_type = other RNA
ctcaaatttgaaaaatttc

SEQ ID NO: 10112 - RNA, 19 nt, synthetic construct
  source 1..19: mol_type = other RNA
actcaaatttgaaaaattt

SEQ ID NO: 10113 - RNA, 19 nt, synthetic construct
  source 1..19: mol_type = other RNA
tactcaaatttgaaaaatt

SEQ ID NO: 10114 - RNA, 19 nt, synthetic construct
  source 1..19: mol_type = other RNA
ttactcaaatttgaaaaat

SEQ ID NO: 10115 - RNA, 19 nt, synthetic construct
  source 1..19: mol_type = other RNA
attactcaaatttgaaaaa

SEQ ID NO: 10116 - RNA, 19 nt, synthetic construct
  source 1..19: mol_type = other RNA
tattactcaaatttgaaaa

SEQ ID NO: 10117 - RNA, 19 nt, synthetic construct
  source 1..19: mol_type = other RNA
ctattactcaaatttgaaa

SEQ ID NO: 10118 - RNA, 19 nt, synthetic construct
  source 1..19: mol_type = other RNA
tctattactcaaatttgaa

SEQ ID NO: 10119 - RNA, 19 nt, synthetic construct
  source 1..19: mol_type = other RNA
atctattactcaaatttga

SEQ ID NO: 10120 - RNA, 19 nt, synthetic construct
  source 1..19: mol_type = other RNA
catctattactcaaatttg

SEQ ID NO: 10121 - RNA, 19 nt, synthetic construct
  source 1..19: mol_type = other RNA
gcatctattactcaaattt

SEQ ID NO: 10122 - RNA, 19 nt, synthetic construct
  source 1..19: mol_type = other RNA
ggcatctattactcaaatt

SEQ ID NO: 10123 - RNA, 19 nt, synthetic construct
  source 1..19: mol_type = other RNA
aggcatctattactcaaat

SEQ ID NO: 10124 - RNA, 19 nt, synthetic construct
  source 1..19: mol_type = other RNA
aaggcatctattactcaaa

SEQ ID NO: 10125 - RNA, 19 nt, synthetic construct
  source 1..19: mol_type = other RNA
aaaggcatctattactcaa

SEQ ID NO: 10126 - RNA, 19 nt, synthetic construct
  source 1..19: mol_type = other RNA
aaaaggcatctattactca

SEQ ID NO: 10127 - RNA, 19 nt, synthetic construct
  source 1..19: mol_type = other RNA
aaaaaggcatctattactc

SEQ ID NO: 10128 - RNA, 19 nt, synthetic construct
  source 1..19: mol_type = other RNA
taaaaaggcatctattact

SEQ ID NO: 10129 - RNA, 19 nt, synthetic construct
  source 1..19: mol_type = other RNA
ttaaaaaggcatctattac

SEQ ID NO: 10130 - RNA, 19 nt, synthetic construct
  source 1..19: mol_type = other RNA
cttaaaaaggcatctatta

SEQ ID NO: 10131 - RNA, 19 nt, synthetic construct
  source 1..19: mol_type = other RNA
ccttaaaaaggcatctatt

SEQ ID NO: 10132 - RNA, 19 nt, synthetic construct
  source 1..19: mol_type = other RNA
gccttaaaaaggcatctat

SEQ ID NO: 10133 - RNA, 19 nt, synthetic construct
  source 1..19: mol_type = other RNA
tgccttaaaaaggcatcta

SEQ ID NO: 10134 - RNA, 19 nt, synthetic construct
  source 1..19: mol_type = other RNA
ctgccttaaaaaggcatct

SEQ ID NO: 10135 - RNA, 19 nt, synthetic construct
  source 1..19: mol_type = other RNA
actgccttaaaaaggcatc

SEQ ID NO: 10136 - RNA, 19 nt, synthetic construct
  source 1..19: mol_type = other RNA
cactgccttaaaaaggcat

SEQ ID NO: 10137 - RNA, 19 nt, synthetic construct
  source 1..19: mol_type = other RNA
tcactgccttaaaaaggca

SEQ ID NO: 10138 - RNA, 19 nt, synthetic construct
  source 1..19: mol_type = other RNA
ttcactgccttaaaaaggc

SEQ ID NO: 10139 - RNA, 19 nt, synthetic construct
  source 1..19: mol_type = other RNA
attcactgccttaaaaagg

SEQ ID NO: 10140 - RNA, 19 nt, synthetic construct
  source 1..19: mol_type = other RNA
aattcactgccttaaaaag

SEQ ID NO: 10141 - RNA, 19 nt, synthetic construct
  source 1..19: mol_type = other RNA
aaattcactgccttaaaaa

SEQ ID NO: 10142 - RNA, 19 nt, synthetic construct
  source 1..19: mol_type = other RNA
taaattcactgccttaaaa

SEQ ID NO: 10143 - RNA, 19 nt, synthetic construct
  source 1..19: mol_type = other RNA
gtaaattcactgccttaaa

SEQ ID NO: 10144 - RNA, 19 nt, synthetic construct
  source 1..19: mol_type = other RNA
tgtaaattcactgccttaa

SEQ ID NO: 10145 - RNA, 19 nt, synthetic construct
  source 1..19: mol_type = other RNA
gtgtaaattcactgcctta

SEQ ID NO: 10146 - RNA, 19 nt, synthetic construct
  source 1..19: mol_type = other RNA
tgtgtaaattcactgcctt

SEQ ID NO: 10147 - RNA, 19 nt, synthetic construct
  source 1..19: mol_type = other RNA
ttgtgtaaattcactgcct

SEQ ID NO: 10148 - RNA, 19 nt, synthetic construct
  source 1..19: mol_type = other RNA
tttgtgtaaattcactgcc

SEQ ID NO: 10149 - RNA, 19 nt, synthetic construct
  source 1..19: mol_type = other RNA
atttgtgtaaattcactgc

SEQ ID NO: 10150 - RNA, 19 nt, synthetic construct
  source 1..19: mol_type = other RNA
tatttgtgtaaattcactg

SEQ ID NO: 10151 - RNA, 19 nt, synthetic construct
  source 1..19: mol_type = other RNA
atatttgtgtaaattcact

SEQ ID NO: 10152 - RNA, 19 nt, synthetic construct
  source 1..19: mol_type = other RNA
catatttgtgtaaattcac

SEQ ID NO: 10153 - RNA, 19 nt, synthetic construct
  source 1..19: mol_type = other RNA
ccatatttgtgtaaattca

SEQ ID NO: 10154 - RNA, 19 nt, synthetic construct
  source 1..19: mol_type = other RNA
cccatatttgtgtaaattc

SEQ ID NO: 10155 - RNA, 19 nt, synthetic construct
  source 1..19: mol_type = other RNA
tcccatatttgtgtaaatt

SEQ ID NO: 10156 - RNA, 19 nt, synthetic construct
  source 1..19: mol_type = other RNA
ctcccatatttgtgtaaat

SEQ ID NO: 10157 - RNA, 19 nt, synthetic construct
  source 1..19: mol_type = other RNA
cctcccatatttgtgtaaa

SEQ ID NO: 10158 - RNA, 19 nt, synthetic construct
  source 1..19: mol_type = other RNA
ccctcccatatttgtgtaa

SEQ ID NO: 10159 - RNA, 19 nt, synthetic construct
  source 1..19: mol_type = other RNA
cccctcccatatttgtgta

SEQ ID NO: 10160 - RNA, 19 nt, synthetic construct
  source 1..19: mol_type = other RNA
acccctcccatatttgtgt

SEQ ID NO: 10161 - RNA, 19 nt, synthetic construct
  source 1..19: mol_type = other RNA
tacccctcccatatttgtg

SEQ ID NO: 10162 - RNA, 19 nt, synthetic construct
  source 1..19: mol_type = other RNA
atacccctcccatatttgt

SEQ ID NO: 10163 - RNA, 19 nt, synthetic construct
  source 1..19: mol_type = other RNA
tatacccctcccatatttg

SEQ ID NO: 10164 - RNA, 19 nt, synthetic construct
  source 1..19: mol_type = other RNA
atatacccctcccatattt

SEQ ID NO: 10165 - RNA, 19 nt, synthetic construct
  source 1..19: mol_type = other RNA
catatacccctcccatatt

SEQ ID NO: 10166 - RNA, 19 nt, synthetic construct
  source 1..19: mol_type = other RNA
ccatatacccctcccatat

SEQ ID NO: 10167 - RNA, 19 nt, synthetic construct
  source 1..19: mol_type = other RNA
accatatacccctcccata

SEQ ID NO: 10168 - RNA, 19 nt, synthetic construct
  source 1..19: mol_type = other RNA
caccatatacccctcccat

SEQ ID NO: 10169 - RNA, 19 nt, synthetic construct
  source 1..19: mol_type = other RNA
acaccatatacccctccca

SEQ ID NO: 10170 - RNA, 19 nt, synthetic construct
  source 1..19: mol_type = other RNA
aacaccatatacccctccc

SEQ ID NO: 10171 - RNA, 19 nt, synthetic construct
  source 1..19: mol_type = other RNA
taacaccatatacccctcc

SEQ ID NO: 10172 - RNA, 19 nt, synthetic construct
  source 1..19: mol_type = other RNA
gtaacaccatatacccctc

SEQ ID NO: 10173 - RNA, 19 nt, synthetic construct
  source 1..19: mol_type = other RNA
agtaacaccatatacccct

SEQ ID NO: 10174 - RNA, 19 nt, synthetic construct
  source 1..19: mol_type = other RNA
cagtaacaccatatacccc

SEQ ID NO: 10175 - RNA, 19 nt, synthetic construct
  source 1..19: mol_type = other RNA
tcagtaacaccatataccc

SEQ ID NO: 10176 - RNA, 19 nt, synthetic construct
  source 1..19: mol_type = other RNA
atcagtaacaccatatacc

SEQ ID NO: 10177 - RNA, 19 nt, synthetic construct
  source 1..19: mol_type = other RNA
aatcagtaacaccatatac

SEQ ID NO: 10178 - RNA, 19 nt, synthetic construct
  source 1..19: mol_type = other RNA
aaatcagtaacaccatata

SEQ ID NO: 10179 - RNA, 19 nt, synthetic construct
  source 1..19: mol_type = other RNA
aaaatcagtaacaccatat

SEQ ID NO: 10180 - RNA, 19 nt, synthetic construct
  source 1..19: mol_type = other RNA
aaaaatcagtaacaccata

SEQ ID NO: 10181 - RNA, 19 nt, synthetic construct
  source 1..19: mol_type = other RNA
taaaaatcagtaacaccat

SEQ ID NO: 10182 - RNA, 19 nt, synthetic construct
  source 1..19: mol_type = other RNA
ttaaaaatcagtaacacca

SEQ ID NO: 10183 - RNA, 19 nt, synthetic construct
  source 1..19: mol_type = other RNA
tttaaaaatcagtaacacc

SEQ ID NO: 10184 - RNA, 19 nt, synthetic construct
  source 1..19: mol_type = other RNA
gtttaaaaatcagtaacac

SEQ ID NO: 10185 - RNA, 19 nt, synthetic construct
  source 1..19: mol_type = other RNA
ggtttaaaaatcagtaaca

SEQ ID NO: 10186 - RNA, 19 nt, synthetic construct
  source 1..19: mol_type = other RNA
aggtttaaaaatcagtaac

SEQ ID NO: 10187 - RNA, 19 nt, synthetic construct
  source 1..19: mol_type = other RNA
gaggtttaaaaatcagtaa

SEQ ID NO: 10188 - RNA, 19 nt, synthetic construct
  source 1..19: mol_type = other RNA
agaggtttaaaaatcagta

SEQ ID NO: 10189 - RNA, 19 nt, synthetic construct
  source 1..19: mol_type = other RNA
aagaggtttaaaaatcagt

SEQ ID NO: 10190 - RNA, 19 nt, synthetic construct
  source 1..19: mol_type = other RNA
aaagaggtttaaaaatcag

SEQ ID NO: 10191 - RNA, 19 nt, synthetic construct
  source 1..19: mol_type = other RNA
caaagaggtttaaaaatca

SEQ ID NO: 10192 - RNA, 19 nt, synthetic construct
  source 1..19: mol_type = other RNA
tcaaagaggtttaaaaatc

SEQ ID NO: 10193 - RNA, 19 nt, synthetic construct
  source 1..19: mol_type = other RNA
gtcaaagaggtttaaaaat

SEQ ID NO: 10194 - RNA, 19 nt, synthetic construct
  source 1..19: mol_type = other RNA
ggtcaaagaggtttaaaaa

SEQ ID NO: 10195 - RNA, 19 nt, synthetic construct
  source 1..19: mol_type = other RNA
tggtcaaagaggtttaaaa

SEQ ID NO: 10196 - RNA, 19 nt, synthetic construct
  source 1..19: mol_type = other RNA
atggtcaaagaggtttaaa

SEQ ID NO: 10197 - RNA, 19 nt, synthetic construct
  source 1..19: mol_type = other RNA
gatggtcaaagaggtttaa

SEQ ID NO: 10198 - RNA, 19 nt, synthetic construct
  source 1..19: mol_type = other RNA
agatggtcaaagaggttta

SEQ ID NO: 10199 - RNA, 19 nt, synthetic construct
  source 1..19: mol_type = other RNA
aagatggtcaaagaggttt

SEQ ID NO: 10200 - RNA, 19 nt, synthetic construct
  source 1..19: mol_type = other RNA
gaagatggtcaaagaggtt

SEQ ID NO: 10201 - RNA, 19 nt, synthetic construct
  source 1..19: mol_type = other RNA
agaagatggtcaaagaggt

SEQ ID NO: 10202 - RNA, 19 nt, synthetic construct
  source 1..19: mol_type = other RNA
tagaagatggtcaaagagg

SEQ ID NO: 10203 - RNA, 19 nt, synthetic construct
  source 1..19: mol_type = other RNA
ctagaagatggtcaaagag

SEQ ID NO: 10204 - RNA, 19 nt, synthetic construct
  source 1..19: mol_type = other RNA
actagaagatggtcaaaga

SEQ ID NO: 10205 - RNA, 19 nt, synthetic construct
  source 1..19: mol_type = other RNA
aactagaagatggtcaaag

SEQ ID NO: 10206 - RNA, 19 nt, synthetic construct
  source 1..19: mol_type = other RNA
aaactagaagatggtcaaa

SEQ ID NO: 10207 - RNA, 19 nt, synthetic construct
  source 1..19: mol_type = other RNA
aaaactagaagatggtcaa

SEQ ID NO: 10208 - RNA, 19 nt, synthetic construct
  source 1..19: mol_type = other RNA
aaaaactagaagatggtca

SEQ ID NO: 10209 - RNA, 19 nt, synthetic construct
  source 1..19: mol_type = other RNA
taaaaactagaagatggtc

SEQ ID NO: 10210 - RNA, 19 nt, synthetic construct
  source 1..19: mol_type = other RNA
gtaaaaactagaagatggt

SEQ ID NO: 10211 - RNA, 19 nt, synthetic construct
  source 1..19: mol_type = other RNA
agtaaaaactagaagatgg

SEQ ID NO: 10212 - RNA, 19 nt, synthetic construct
  source 1..19: mol_type = other RNA
aagtaaaaactagaagatg

SEQ ID NO: 10213 - RNA, 19 nt, synthetic construct
  source 1..19: mol_type = other RNA
gaagtaaaaactagaagat

SEQ ID NO: 10214 - RNA, 19 nt, synthetic construct
  source 1..19: mol_type = other RNA
agaagtaaaaactagaaga

SEQ ID NO: 10215 - RNA, 19 nt, synthetic construct
  source 1..19: mol_type = other RNA
tagaagtaaaaactagaag

SEQ ID NO: 10216 - RNA, 19 nt, synthetic construct
  source 1..19: mol_type = other RNA
ctagaagtaaaaactagaa

SEQ ID NO: 10217 - RNA, 19 nt, synthetic construct
  source 1..19: mol_type = other RNA
actagaagtaaaaactaga

SEQ ID NO: 10218 - RNA, 19 nt, synthetic construct
  source 1..19: mol_type = other RNA
aactagaagtaaaaactag

SEQ ID NO: 10219 - RNA, 19 nt, synthetic construct
  source 1..19: mol_type = other RNA
aaactagaagtaaaaacta

SEQ ID NO: 10220 - RNA, 19 nt, synthetic construct
  source 1..19: mol_type = other RNA
aaaactagaagtaaaaact

SEQ ID NO: 10221 - RNA, 19 nt, synthetic construct
  source 1..19: mol_type = other RNA
aaaaactagaagtaaaaac

SEQ ID NO: 10222 - RNA, 19 nt, synthetic construct
  source 1..19: mol_type = other RNA
taaaaactagaagtaaaaa

SEQ ID NO: 10223 - RNA, 19 nt, synthetic construct
  source 1..19: mol_type = other RNA
gtaaaaactagaagtaaaa

SEQ ID NO: 10224 - RNA, 19 nt, synthetic construct
  source 1..19: mol_type = other RNA
tgtaaaaactagaagtaaa

SEQ ID NO: 10225 - RNA, 19 nt, synthetic construct
  source 1..19: mol_type = other RNA
atgtaaaaactagaagtaa

SEQ ID NO: 10226 - RNA, 19 nt, synthetic construct
  source 1..19: mol_type = other RNA
gatgtaaaaactagaagta

SEQ ID NO: 10227 - RNA, 19 nt, synthetic construct
  source 1..19: mol_type = other RNA
agatgtaaaaactagaagt

SEQ ID NO: 10228 - RNA, 19 nt, synthetic construct
  source 1..19: mol_type = other RNA
tagatgtaaaaactagaag

SEQ ID NO: 10229 - RNA, 19 nt, synthetic construct
  source 1..19: mol_type = other RNA
ctagatgtaaaaactagaa

SEQ ID NO: 10230 - RNA, 19 nt, synthetic construct
  source 1..19: mol_type = other RNA
cctagatgtaaaaactaga

SEQ ID NO: 10231 - RNA, 19 nt, synthetic construct
  source 1..19: mol_type = other RNA
tcctagatgtaaaaactag

SEQ ID NO: 10232 - RNA, 19 nt, synthetic construct
  source 1..19: mol_type = other RNA
ctcctagatgtaaaaacta

SEQ ID NO: 10233 - RNA, 19 nt, synthetic construct
  source 1..19: mol_type = other RNA
tctcctagatgtaaaaact

SEQ ID NO: 10234 - RNA, 19 nt, synthetic construct
  source 1..19: mol_type = other RNA
ttctcctagatgtaaaaac

SEQ ID NO: 10235 - RNA, 19 nt, synthetic construct
  source 1..19: mol_type = other RNA
attctcctagatgtaaaaa

SEQ ID NO: 10236 - RNA, 19 nt, synthetic construct
  source 1..19: mol_type = other RNA
aattctcctagatgtaaaa

SEQ ID NO: 10237 - RNA, 19 nt, synthetic construct
  source 1..19: mol_type = other RNA
caattctcctagatgtaaa

SEQ ID NO: 10238 - RNA, 19 nt, synthetic construct
  source 1..19: mol_type = other RNA
acaattctcctagatgtaa

SEQ ID NO: 10239 - RNA, 19 nt, synthetic construct
  source 1..19: mol_type = other RNA
cacaattctcctagatgta

SEQ ID NO: 10240 - RNA, 19 nt, synthetic construct
  source 1..19: mol_type = other RNA
tcacaattctcctagatgt

SEQ ID NO: 10241 - RNA, 19 nt, synthetic construct
  source 1..19: mol_type = other RNA
ttcacaattctcctagatg

SEQ ID NO: 10242 - RNA, 19 nt, synthetic construct
  source 1..19: mol_type = other RNA
attcacaattctcctagat

SEQ ID NO: 10243 - RNA, 19 nt, synthetic construct
  source 1..19: mol_type = other RNA
tattcacaattctcctaga

SEQ ID NO: 10244 - RNA, 19 nt, synthetic construct
  source 1..19: mol_type = other RNA
ttattcacaattctcctag

SEQ ID NO: 10245 - RNA, 19 nt, synthetic construct
  source 1..19: mol_type = other RNA
gttattcacaattctccta

SEQ ID NO: 10246 - RNA, 19 nt, synthetic construct
  source 1..19: mol_type = other RNA
tgttattcacaattctcct

SEQ ID NO: 10247 - RNA, 19 nt, synthetic construct
  source 1..19: mol_type = other RNA
gtgttattcacaattctcc

SEQ ID NO: 10248 - RNA, 19 nt, synthetic construct
  source 1..19: mol_type = other RNA
ggtgttattcacaattctc

SEQ ID NO: 10249 - RNA, 19 nt, synthetic construct
  source 1..19: mol_type = other RNA
tggtgttattcacaattct

SEQ ID NO: 10250 - RNA, 19 nt, synthetic construct
  source 1..19: mol_type = other RNA
ttggtgttattcacaattc

SEQ ID NO: 10251 - RNA, 19 nt, synthetic construct
  source 1..19: mol_type = other RNA
gttggtgttattcacaatt

SEQ ID NO: 10252 - RNA, 19 nt, synthetic construct
  source 1..19: mol_type = other RNA
agttggtgttattcacaat

SEQ ID NO: 10253 - RNA, 19 nt, synthetic construct
  source 1..19: mol_type = other RNA
cagttggtgttattcacaa

SEQ ID NO: 10254 - RNA, 19 nt, synthetic construct
  source 1..19: mol_type = other RNA
acagttggtgttattcaca

SEQ ID NO: 10255 - RNA, 19 nt, synthetic construct
  source 1..19: mol_type = other RNA
aacagttggtgttattcac

SEQ ID NO: 10256 - RNA, 19 nt, synthetic construct
  source 1..19: mol_type = other RNA
gaacagttggtgttattca

SEQ ID NO: 10257 - RNA, 19 nt, synthetic construct
  source 1..19: mol_type = other RNA
agaacagttggtgttattc

SEQ ID NO: 10258 - RNA, 19 nt, synthetic construct
  source 1..19: mol_type = other RNA
aagaacagttggtgttatt

SEQ ID NO: 10259 - RNA, 19 nt, synthetic construct
  source 1..19: mol_type = other RNA
taagaacagttggtgttat

SEQ ID NO: 10260 - RNA, 19 nt, synthetic construct
  source 1..19: mol_type = other RNA
ttaagaacagttggtgtta

SEQ ID NO: 10261 - RNA, 19 nt, synthetic construct
  source 1..19: mol_type = other RNA
tttaagaacagttggtgtt

SEQ ID NO: 10262 - RNA, 19 nt, synthetic construct
  source 1..19: mol_type = other RNA
gtttaagaacagttggtgt

SEQ ID NO: 10263 - RNA, 19 nt, synthetic construct
  source 1..19: mol_type = other RNA
agtttaagaacagttggtg

SEQ ID NO: 10264 - RNA, 19 nt, synthetic construct
  source 1..19: mol_type = other RNA
gagtttaagaacagttggt

SEQ ID NO: 10265 - RNA, 19 nt, synthetic construct
  source 1..19: mol_type = other RNA
agagtttaagaacagttgg

SEQ ID NO: 10266 - RNA, 19 nt, synthetic construct
  source 1..19: mol_type = other RNA
aagagtttaagaacagttg

SEQ ID NO: 10267 - RNA, 19 nt, synthetic construct
  source 1..19: mol_type = other RNA
aaagagtttaagaacagtt

SEQ ID NO: 10268 - RNA, 19 nt, synthetic construct
  source 1..19: mol_type = other RNA
taaagagtttaagaacagt

SEQ ID NO: 10269 - RNA, 19 nt, synthetic construct
  source 1..19: mol_type = other RNA
ttaaagagtttaagaacag

SEQ ID NO: 10270 - RNA, 19 nt, synthetic construct
  source 1..19: mol_type = other RNA
attaaagagtttaagaaca

SEQ ID NO: 10271 - RNA, 19 nt, synthetic construct
  source 1..19: mol_type = other RNA
cattaaagagtttaagaac

SEQ ID NO: 10272 - RNA, 19 nt, synthetic construct
  source 1..19: mol_type = other RNA
gcattaaagagtttaagaa

SEQ ID NO: 10273 - RNA, 19 nt, synthetic construct
  source 1..19: mol_type = other RNA
ggcattaaagagtttaaga

SEQ ID NO: 10274 - RNA, 19 nt, synthetic construct
  source 1..19: mol_type = other RNA
tggcattaaagagtttaag

SEQ ID NO: 10275 - RNA, 19 nt, synthetic construct
  source 1..19: mol_type = other RNA
atggcattaaagagtttaa

SEQ ID NO: 10276 - RNA, 19 nt, synthetic construct
  source 1..19: mol_type = other RNA
catggcattaaagagttta

SEQ ID NO: 10277 - RNA, 19 nt, synthetic construct
  source 1..19: mol_type = other RNA
acatggcattaaagagttt

SEQ ID NO: 10278 - RNA, 19 nt, synthetic construct
  source 1..19: mol_type = other RNA
gacatggcattaaagagtt

SEQ ID NO: 10279 - RNA, 19 nt, synthetic construct
  source 1..19: mol_type = other RNA
agacatggcattaaagagt

SEQ ID NO: 10280 - RNA, 19 nt, synthetic construct
  source 1..19: mol_type = other RNA
aagacatggcattaaagag

SEQ ID NO: 10281 - RNA, 19 nt, synthetic construct
  source 1..19: mol_type = other RNA
taagacatggcattaaaga

SEQ ID NO: 10282 - RNA, 19 nt, synthetic construct
  source 1..19: mol_type = other RNA
ttaagacatggcattaaag

SEQ ID NO: 10283 - RNA, 19 nt, synthetic construct
  source 1..19: mol_type = other RNA
tttaagacatggcattaaa

SEQ ID NO: 10284 - RNA, 19 nt, synthetic construct
  source 1..19: mol_type = other RNA
atttaagacatggcattaa

SEQ ID NO: 10285 - RNA, 19 nt, synthetic construct
  source 1..19: mol_type = other RNA
catttaagacatggcatta

SEQ ID NO: 10286 - RNA, 19 nt, synthetic construct
  source 1..19: mol_type = other RNA
gcatttaagacatggcatt

SEQ ID NO: 10287 - RNA, 19 nt, synthetic construct
  source 1..19: mol_type = other RNA
ggcatttaagacatggcat

SEQ ID NO: 10288 - RNA, 19 nt, synthetic construct
  source 1..19: mol_type = other RNA
cggcatttaagacatggca

SEQ ID NO: 10289 - RNA, 19 nt, synthetic construct
  source 1..19: mol_type = other RNA
ccggcatttaagacatggc

SEQ ID NO: 10290 - RNA, 19 nt, synthetic construct
  source 1..19: mol_type = other RNA
accggcatttaagacatgg

SEQ ID NO: 10291 - RNA, 19 nt, synthetic construct
  source 1..19: mol_type = other RNA
taccggcatttaagacatg

SEQ ID NO: 10292 - RNA, 19 nt, synthetic construct
  source 1..19: mol_type = other RNA
ataccggcatttaagacat

SEQ ID NO: 10293 - RNA, 19 nt, synthetic construct
  source 1..19: mol_type = other RNA
aataccggcatttaagaca

SEQ ID NO: 10294 - RNA, 19 nt, synthetic construct
  source 1..19: mol_type = other RNA
aaataccggcatttaagac

SEQ ID NO: 10295 - RNA, 19 nt, synthetic construct
  source 1..19: mol_type = other RNA
caaataccggcatttaaga

SEQ ID NO: 10296 - RNA, 19 nt, synthetic construct
  source 1..19: mol_type = other RNA
gcaaataccggcatttaag

SEQ ID NO: 10297 - RNA, 19 nt, synthetic construct
  source 1..19: mol_type = other RNA
agcaaataccggcatttaa

SEQ ID NO: 10298 - RNA, 19 nt, synthetic construct
  source 1..19: mol_type = other RNA
cagcaaataccggcattta

SEQ ID NO: 10299 - RNA, 19 nt, synthetic construct
  source 1..19: mol_type = other RNA
gcagcaaataccggcattt

SEQ ID NO: 10300 - RNA, 19 nt, synthetic construct
  source 1..19: mol_type = other RNA
agcagcaaataccggcatt

SEQ ID NO: 10301 - RNA, 19 nt, synthetic construct
  source 1..19: mol_type = other RNA
cagcagcaaataccggcat

SEQ ID NO: 10302 - RNA, 19 nt, synthetic construct
  source 1..19: mol_type = other RNA
tcagcagcaaataccggca

SEQ ID NO: 10303 - RNA, 19 nt, synthetic construct
  source 1..19: mol_type = other RNA
ttcagcagcaaataccggc

SEQ ID NO: 10304 - RNA, 19 nt, synthetic construct
  source 1..19: mol_type = other RNA
cttcagcagcaaataccgg

SEQ ID NO: 10305 - RNA, 19 nt, synthetic construct
  source 1..19: mol_type = other RNA
tcttcagcagcaaataccg

SEQ ID NO: 10306 - RNA, 19 nt, synthetic construct
  source 1..19: mol_type = other RNA
gtcttcagcagcaaatacc

SEQ ID NO: 10307 - RNA, 19 nt, synthetic construct
  source 1..19: mol_type = other RNA
tgtcttcagcagcaaatac

SEQ ID NO: 10308 - RNA, 19 nt, synthetic construct
  source 1..19: mol_type = other RNA
ttgtcttcagcagcaaata

SEQ ID NO: 10309 - RNA, 19 nt, synthetic construct
  source 1..19: mol_type = other RNA
tttgtcttcagcagcaaat

SEQ ID NO: 10310 - RNA, 19 nt, synthetic construct
  source 1..19: mol_type = other RNA
ttttgtcttcagcagcaaa

SEQ ID NO: 10311 - RNA, 19 nt, synthetic construct
  source 1..19: mol_type = other RNA
tttttgtcttcagcagcaa

SEQ ID NO: 10312 - RNA, 19 nt, synthetic construct
  source 1..19: mol_type = other RNA
atttttgtcttcagcagca

SEQ ID NO: 10313 - RNA, 19 nt, synthetic construct
  source 1..19: mol_type = other RNA
catttttgtcttcagcagc

SEQ ID NO: 10314 - RNA, 19 nt, synthetic construct
  source 1..19: mol_type = other RNA
tcatttttgtcttcagcag

SEQ ID NO: 10315 - RNA, 19 nt, synthetic construct
  source 1..19: mol_type = other RNA
ttcatttttgtcttcagca

SEQ ID NO: 10316 - RNA, 19 nt, synthetic construct
  source 1..19: mol_type = other RNA
tttcatttttgtcttcagc

SEQ ID NO: 10317 - RNA, 19 nt, synthetic construct
  source 1..19: mol_type = other RNA
ttttcatttttgtcttcag

SEQ ID NO: 10318 - RNA, 19 nt, synthetic construct
  source 1..19: mol_type = other RNA
cttttcatttttgtcttca

SEQ ID NO: 10319 - RNA, 19 nt, synthetic construct
  source 1..19: mol_type = other RNA
acttttcatttttgtcttc

SEQ ID NO: 10320 - RNA, 19 nt, synthetic construct
  source 1..19: mol_type = other RNA
tacttttcatttttgtctt

SEQ ID NO: 10321 - RNA, 19 nt, synthetic construct
  source 1..19: mol_type = other RNA
ctacttttcatttttgtct

SEQ ID NO: 10322 - RNA, 19 nt, synthetic construct
  source 1..19: mol_type = other RNA
cctacttttcatttttgtc

SEQ ID NO: 10323 - RNA, 19 nt, synthetic construct
  source 1..19: mol_type = other RNA
tcctacttttcatttttgt

SEQ ID NO: 10324 - RNA, 19 nt, synthetic construct
  source 1..19: mol_type = other RNA
atcctacttttcatttttg

SEQ ID NO: 10325 - RNA, 19 nt, synthetic construct
  source 1..19: mol_type = other RNA
catcctacttttcattttt

SEQ ID NO: 10326 - RNA, 19 nt, synthetic construct
  source 1..19: mol_type = other RNA
tcatcctacttttcatttt

SEQ ID NO: 10327 - RNA, 19 nt, synthetic construct
  source 1..19: mol_type = other RNA
ttcatcctacttttcattt

SEQ ID NO: 10328 - RNA, 19 nt, synthetic construct
  source 1..19: mol_type = other RNA
tttcatcctacttttcatt

SEQ ID NO: 10329 - RNA, 19 nt, synthetic construct
  source 1..19: mol_type = other RNA
ttttcatcctacttttcat

SEQ ID NO: 10330 - RNA, 19 nt, synthetic construct
  source 1..19: mol_type = other RNA
attttcatcctacttttca

SEQ ID NO: 10331 - RNA, 19 nt, synthetic construct
  source 1..19: mol_type = other RNA
tattttcatcctacttttc

SEQ ID NO: 10332 - RNA, 19 nt, synthetic construct
  source 1..19: mol_type = other RNA
ttattttcatcctactttt

SEQ ID NO: 10333 - RNA, 19 nt, synthetic construct
  source 1..19: mol_type = other RNA
attattttcatcctacttt

SEQ ID NO: 10334 - RNA, 19 nt, synthetic construct
  source 1..19: mol_type = other RNA
tattattttcatcctactt

SEQ ID NO: 10335 - RNA, 19 nt, synthetic construct
  source 1..19: mol_type = other RNA
ctattattttcatcctact

SEQ ID NO: 10336 - RNA, 19 nt, synthetic construct
  source 1..19: mol_type = other RNA
tctattattttcatcctac

SEQ ID NO: 10337 - RNA, 19 nt, synthetic construct
  source 1..19: mol_type = other RNA
ttctattattttcatccta

SEQ ID NO: 10338 - RNA, 19 nt, synthetic construct
  source 1..19: mol_type = other RNA
attctattattttcatcct

SEQ ID NO: 10339 - RNA, 19 nt, synthetic construct
  source 1..19: mol_type = other RNA
cattctattattttcatcc

SEQ ID NO: 10340 - RNA, 19 nt, synthetic construct
  source 1..19: mol_type = other RNA
ccattctattattttcatc

SEQ ID NO: 10341 - RNA, 19 nt, synthetic construct
  source 1..19: mol_type = other RNA
gccattctattattttcat

SEQ ID NO: 10342 - RNA, 19 nt, synthetic construct
  source 1..19: mol_type = other RNA
tgccattctattattttca

SEQ ID NO: 10343 - RNA, 19 nt, synthetic construct
  source 1..19: mol_type = other RNA
gtgccattctattattttc

SEQ ID NO: 10344 - RNA, 19 nt, synthetic construct
  source 1..19: mol_type = other RNA
agtgccattctattatttt

SEQ ID NO: 10345 - RNA, 19 nt, synthetic construct
  source 1..19: mol_type = other RNA
cagtgccattctattattt

SEQ ID NO: 10346 - RNA, 19 nt, synthetic construct
  source 1..19: mol_type = other RNA
acagtgccattctattatt

SEQ ID NO: 10347 - RNA, 19 nt, synthetic construct
  source 1..19: mol_type = other RNA
tacagtgccattctattat

SEQ ID NO: 10348 - RNA, 19 nt, synthetic construct
  source 1..19: mol_type = other RNA
ttacagtgccattctatta

SEQ ID NO: 10349 - RNA, 19 nt, synthetic construct
  source 1..19: mol_type = other RNA
cttacagtgccattctatt

SEQ ID NO: 10350 - RNA, 19 nt, synthetic construct
  source 1..19: mol_type = other RNA
acttacagtgccattctat

SEQ ID NO: 10351 - RNA, 19 nt, synthetic construct
  source 1..19: mol_type = other RNA
cacttacagtgccattcta

SEQ ID NO: 10352 - RNA, 19 nt, synthetic construct
  source 1..19: mol_type = other RNA
acacttacagtgccattct

SEQ ID NO: 10353 - RNA, 19 nt, synthetic construct
  source 1..19: mol_type = other RNA
aacacttacagtgccattc

SEQ ID NO: 10354 - RNA, 19 nt, synthetic construct
  source 1..19: mol_type = other RNA
aaacacttacagtgccatt

SEQ ID NO: 10355 - RNA, 19 nt, synthetic construct
  source 1..19: mol_type = other RNA
taaacacttacagtgccat

SEQ ID NO: 10356 - RNA, 19 nt, synthetic construct
  source 1..19: mol_type = other RNA
ataaacacttacagtgcca

SEQ ID NO: 10357 - RNA, 19 nt, synthetic construct
  source 1..19: mol_type = other RNA
aataaacacttacagtgcc

SEQ ID NO: 10358 - RNA, 19 nt, synthetic construct
  source 1..19: mol_type = other RNA
taataaacacttacagtgc

SEQ ID NO: 10359 - RNA, 19 nt, synthetic construct
  source 1..19: mol_type = other RNA
ataataaacacttacagtg

SEQ ID NO: 10360 - RNA, 19 nt, synthetic construct
  source 1..19: mol_type = other RNA
aataataaacacttacagt

SEQ ID NO: 10361 - RNA, 19 nt, synthetic construct
  source 1..19: mol_type = other RNA
aaataataaacacttacag

SEQ ID NO: 10362 - RNA, 19 nt, synthetic construct
  source 1..19: mol_type = other RNA
aaaataataaacacttaca

SEQ ID NO: 10363 - RNA, 19 nt, synthetic construct
  source 1..19: mol_type = other RNA
caaaataataaacacttac

SEQ ID NO: 10364 - RNA, 19 nt, synthetic construct
  source 1..19: mol_type = other RNA
acaaaataataaacactta

SEQ ID NO: 10365 - RNA, 19 nt, synthetic construct
  source 1..19: mol_type = other RNA
gacaaaataataaacactt

SEQ ID NO: 10366 - RNA, 19 nt, synthetic construct
  source 1..19: mol_type = other RNA
tgacaaaataataaacact

SEQ ID NO: 10367 - RNA, 19 nt, synthetic construct
  source 1..19: mol_type = other RNA
ttgacaaaataataaacac

SEQ ID NO: 10368 - RNA, 19 nt, synthetic construct
  source 1..19: mol_type = other RNA
tttgacaaaataataaaca

SEQ ID NO: 10369 - RNA, 19 nt, synthetic construct
  source 1..19: mol_type = other RNA
ttttgacaaaataataaac

SEQ ID NO: 10370 - RNA, 19 nt, synthetic construct
  source 1..19: mol_type = other RNA
attttgacaaaataataaa

SEQ ID NO: 10371 - RNA, 19 nt, synthetic construct
  source 1..19: mol_type = other RNA
cattttgacaaaataataa

SEQ ID NO: 10372 - RNA, 19 nt, synthetic construct
  source 1..19: mol_type = other RNA
acattttgacaaaataata

SEQ ID NO: 10373 - RNA, 19 nt, synthetic construct
  source 1..19: mol_type = other RNA
tacattttgacaaaataat

SEQ ID NO: 10374 - RNA, 19 nt, synthetic construct
  source 1..19: mol_type = other RNA
ttacattttgacaaaataa

SEQ ID NO: 10375 - RNA, 19 nt, synthetic construct
  source 1..19: mol_type = other RNA
tttacattttgacaaaata

SEQ ID NO: 10376 - RNA, 19 nt, synthetic construct
  source 1..19: mol_type = other RNA
gtttacattttgacaaaat

SEQ ID NO: 10377 - RNA, 19 nt, synthetic construct
  source 1..19: mol_type = other RNA
tgtttacattttgacaaaa

SEQ ID NO: 10378 - RNA, 19 nt, synthetic construct
  source 1..19: mol_type = other RNA
ttgtttacattttgacaaa

SEQ ID NO: 10379 - RNA, 19 nt, synthetic construct
  source 1..19: mol_type = other RNA
tttgtttacattttgacaa

SEQ ID NO: 10380 - RNA, 19 nt, synthetic construct
  source 1..19: mol_type = other RNA
ctttgtttacattttgaca

SEQ ID NO: 10381 - RNA, 19 nt, synthetic construct
  source 1..19: mol_type = other RNA
tctttgtttacattttgac

SEQ ID NO: 10382 - RNA, 19 nt, synthetic construct
  source 1..19: mol_type = other RNA
gtctttgtttacattttga

SEQ ID NO: 10383 - RNA, 19 nt, synthetic construct
  source 1..19: mol_type = other RNA
agtctttgtttacattttg

SEQ ID NO: 10384 - RNA, 19 nt, synthetic construct
  source 1..19: mol_type = other RNA
tagtctttgtttacatttt

SEQ ID NO: 10385 - RNA, 19 nt, synthetic construct
  source 1..19: mol_type = other RNA
gtagtctttgtttacattt

SEQ ID NO: 10386 - RNA, 19 nt, synthetic construct
  source 1..19: mol_type = other RNA
tgtagtctttgtttacatt

SEQ ID NO: 10387 - RNA, 19 nt, synthetic construct
  source 1..19: mol_type = other RNA
atgtagtctttgtttacat

SEQ ID NO: 10388 - RNA, 19 nt, synthetic construct
  source 1..19: mol_type = other RNA
tatgtagtctttgtttaca

SEQ ID NO: 10389 - RNA, 19 nt, synthetic construct
  source 1..19: mol_type = other RNA
ttatgtagtctttgtttac

SEQ ID NO: 10390 - RNA, 19 nt, synthetic construct
  source 1..19: mol_type = other RNA
gttatgtagtctttgttta

SEQ ID NO: 10391 - RNA, 19 nt, synthetic construct
  source 1..19: mol_type = other RNA
ggttatgtagtctttgttt

SEQ ID NO: 10392 - RNA, 19 nt, synthetic construct
  source 1..19: mol_type = other RNA
gggttatgtagtctttgtt

SEQ ID NO: 10393 - RNA, 19 nt, synthetic construct
  source 1..19: mol_type = other RNA
tgggttatgtagtctttgt

SEQ ID NO: 10394 - RNA, 19 nt, synthetic construct
  source 1..19: mol_type = other RNA
ttgggttatgtagtctttg

SEQ ID NO: 10395 - RNA, 19 nt, synthetic construct
  source 1..19: mol_type = other RNA
attgggttatgtagtcttt

SEQ ID NO: 10396 - RNA, 19 nt, synthetic construct
  source 1..19: mol_type = other RNA
cattgggttatgtagtctt

SEQ ID NO: 10397 - RNA, 19 nt, synthetic construct
  source 1..19: mol_type = other RNA
tcattgggttatgtagtct

SEQ ID NO: 10398 - RNA, 19 nt, synthetic construct
  source 1..19: mol_type = other RNA
atcattgggttatgtagtc

SEQ ID NO: 10399 - RNA, 19 nt, synthetic construct
  source 1..19: mol_type = other RNA
catcattgggttatgtagt

SEQ ID NO: 10400 - RNA, 19 nt, synthetic construct
  source 1..19: mol_type = other RNA
ccatcattgggttatgtag

SEQ ID NO: 10401 - RNA, 19 nt, synthetic construct
  source 1..19: mol_type = other RNA
tccatcattgggttatgta

SEQ ID NO: 10402 - RNA, 19 nt, synthetic construct
  source 1..19: mol_type = other RNA
ctccatcattgggttatgt

SEQ ID NO: 10403 - RNA, 19 nt, synthetic construct
  source 1..19: mol_type = other RNA
cctccatcattgggttatg

SEQ ID NO: 10404 - RNA, 19 nt, synthetic construct
  source 1..19: mol_type = other RNA
ccctccatcattgggttat

SEQ ID NO: 10405 - RNA, 19 nt, synthetic construct
  source 1..19: mol_type = other RNA
tccctccatcattgggtta

SEQ ID NO: 10406 - RNA, 19 nt, synthetic construct
  source 1..19: mol_type = other RNA
ttccctccatcattgggtt

SEQ ID NO: 10407 - RNA, 19 nt, synthetic construct
  source 1..19: mol_type = other RNA
tttccctccatcattgggt

SEQ ID NO: 10408 - RNA, 19 nt, synthetic construct
  source 1..19: mol_type = other RNA
ttttccctccatcattggg

SEQ ID NO: 10409 - RNA, 19 nt, synthetic construct
  source 1..19: mol_type = other RNA
tttttccctccatcattgg

SEQ ID NO: 10410 - RNA, 19 nt, synthetic construct
  source 1..19: mol_type = other RNA
ctttttccctccatcattg

SEQ ID NO: 10411 - RNA, 19 nt, synthetic construct
  source 1..19: mol_type = other RNA
cctttttccctccatcatt

SEQ ID NO: 10412 - RNA, 19 nt, synthetic construct
  source 1..19: mol_type = other RNA
ccctttttccctccatcat

SEQ ID NO: 10413 - RNA, 19 nt, synthetic construct
  source 1..19: mol_type = other RNA
gccctttttccctccatca

SEQ ID NO: 10414 - RNA, 19 nt, synthetic construct
  source 1..19: mol_type = other RNA
tgccctttttccctccatc

SEQ ID NO: 10415 - RNA, 19 nt, synthetic construct
  source 1..19: mol_type = other RNA
atgccctttttccctccat

SEQ ID NO: 10416 - RNA, 19 nt, synthetic construct
  source 1..19: mol_type = other RNA
catgccctttttccctcca

SEQ ID NO: 10417 - RNA, 19 nt, synthetic construct
  source 1..19: mol_type = other RNA
acatgccctttttccctcc

SEQ ID NO: 10418 - RNA, 19 nt, synthetic construct
  source 1..19: mol_type = other RNA
tacatgccctttttccctc

SEQ ID NO: 10419 - RNA, 19 nt, synthetic construct
  source 1..19: mol_type = other RNA
atacatgccctttttccct

SEQ ID NO: 10420 - RNA, 19 nt, synthetic construct
  source 1..19: mol_type = other RNA
gatacatgccctttttccc

SEQ ID NO: 10421 - RNA, 19 nt, synthetic construct
  source 1..19: mol_type = other RNA
agatacatgccctttttcc

SEQ ID NO: 10422 - RNA, 19 nt, synthetic construct
  source 1..19: mol_type = other RNA
gagatacatgccctttttc

SEQ ID NO: 10423 - RNA, 19 nt, synthetic construct
  source 1..19: mol_type = other RNA
tgagatacatgcccttttt

SEQ ID NO: 10424 - RNA, 19 nt, synthetic construct
  source 1..19: mol_type = other RNA
atgagatacatgccctttt

SEQ ID NO: 10425 - RNA, 19 nt, synthetic construct
  source 1..19: mol_type = other RNA
aatgagatacatgcccttt

SEQ ID NO: 10426 - RNA, 19 nt, synthetic construct
  source 1..19: mol_type = other RNA
gaatgagatacatgccctt

SEQ ID NO: 10427 - RNA, 19 nt, synthetic construct
  source 1..19: mol_type = other RNA
tgaatgagatacatgccct

SEQ ID NO: 10428 - RNA, 19 nt, synthetic construct
  source 1..19: mol_type = other RNA
ctgaatgagatacatgccc

SEQ ID NO: 10429 - RNA, 19 nt, synthetic construct
  source 1..19: mol_type = other RNA
tctgaatgagatacatgcc

SEQ ID NO: 10430 - RNA, 19 nt, synthetic construct
  source 1..19: mol_type = other RNA
atctgaatgagatacatgc

SEQ ID NO: 10431 - RNA, 19 nt, synthetic construct
  source 1..19: mol_type = other RNA
catctgaatgagatacatg

SEQ ID NO: 10432 - RNA, 19 nt, synthetic construct
  source 1..19: mol_type = other RNA
acatctgaatgagatacat

SEQ ID NO: 10433 - RNA, 19 nt, synthetic construct
  source 1..19: mol_type = other RNA
cacatctgaatgagataca

SEQ ID NO: 10434 - RNA, 19 nt, synthetic construct
  source 1..19: mol_type = other RNA
gcacatctgaatgagatac

SEQ ID NO: 10435 - RNA, 19 nt, synthetic construct
  source 1..19: mol_type = other RNA
ggcacatctgaatgagata

SEQ ID NO: 10436 - RNA, 19 nt, synthetic construct
  source 1..19: mol_type = other RNA
aggcacatctgaatgagat

SEQ ID NO: 10437 - RNA, 19 nt, synthetic construct
  source 1..19: mol_type = other RNA
aaggcacatctgaatgaga

SEQ ID NO: 10438 - RNA, 19 nt, synthetic construct
  source 1..19: mol_type = other RNA
aaaggcacatctgaatgag

SEQ ID NO: 10439 - RNA, 19 nt, synthetic construct
  source 1..19: mol_type = other RNA
aaaaggcacatctgaatga

SEQ ID NO: 10440 - RNA, 19 nt, synthetic construct
  source 1..19: mol_type = other RNA
caaaaggcacatctgaatg

SEQ ID NO: 10441 - RNA, 19 nt, synthetic construct
  source 1..19: mol_type = other RNA
acaaaaggcacatctgaat

SEQ ID NO: 10442 - RNA, 19 nt, synthetic construct
  source 1..19: mol_type = other RNA
aacaaaaggcacatctgaa

SEQ ID NO: 10443 - RNA, 19 nt, synthetic construct
  source 1..19: mol_type = other RNA
aaacaaaaggcacatctga

SEQ ID NO: 10444 - RNA, 19 nt, synthetic construct
  source 1..19: mol_type = other RNA
aaaacaaaaggcacatctg

SEQ ID NO: 10445 - RNA, 19 nt, synthetic construct
  source 1..19: mol_type = other RNA
aaaaacaaaaggcacatct

SEQ ID NO: 10446 - RNA, 19 nt, synthetic construct
  source 1..19: mol_type = other RNA
caaaaacaaaaggcacatc

SEQ ID NO: 10447 - RNA, 19 nt, synthetic construct
  source 1..19: mol_type = other RNA
gcaaaaacaaaaggcacat

SEQ ID NO: 10448 - RNA, 19 nt, synthetic construct
  source 1..19: mol_type = other RNA
tgcaaaaacaaaaggcaca

SEQ ID NO: 10449 - RNA, 19 nt, synthetic construct
  source 1..19: mol_type = other RNA
ctgcaaaaacaaaaggcac

SEQ ID NO: 10450 - RNA, 19 nt, synthetic construct
  source 1..19: mol_type = other RNA
tctgcaaaaacaaaaggca

SEQ ID NO: 10451 - RNA, 19 nt, synthetic construct
  source 1..19: mol_type = other RNA
gtctgcaaaaacaaaaggc

SEQ ID NO: 10452 - RNA, 19 nt, synthetic construct
  source 1..19: mol_type = other RNA
agtctgcaaaaacaaaagg

SEQ ID NO: 10453 - RNA, 19 nt, synthetic construct
  source 1..19: mol_type = other RNA
tagtctgcaaaaacaaaag

SEQ ID NO: 10454 - RNA, 19 nt, synthetic construct
  source 1..19: mol_type = other RNA
atagtctgcaaaaacaaaa

SEQ ID NO: 10455 - RNA, 19 nt, synthetic construct
  source 1..19: mol_type = other RNA
catagtctgcaaaaacaaa

SEQ ID NO: 10456 - RNA, 19 nt, synthetic construct
  source 1..19: mol_type = other RNA
tcatagtctgcaaaaacaa

SEQ ID NO: 10457 - RNA, 19 nt, synthetic construct
  source 1..19: mol_type = other RNA
gtcatagtctgcaaaaaca

SEQ ID NO: 10458 - RNA, 19 nt, synthetic construct
  source 1..19: mol_type = other RNA
cgtcatagtctgcaaaaac

SEQ ID NO: 10459 - RNA, 19 nt, synthetic construct
  source 1..19: mol_type = other RNA
acgtcatagtctgcaaaaa

SEQ ID NO: 10460 - RNA, 19 nt, synthetic construct
  source 1..19: mol_type = other RNA
gacgtcatagtctgcaaaa

SEQ ID NO: 10461 - RNA, 19 nt, synthetic construct
  source 1..19: mol_type = other RNA
agacgtcatagtctgcaaa

SEQ ID NO: 10462 - RNA, 19 nt, synthetic construct
  source 1..19: mol_type = other RNA
aagacgtcatagtctgcaa

SEQ ID NO: 10463 - RNA, 19 nt, synthetic construct
  source 1..19: mol_type = other RNA
aaagacgtcatagtctgca

SEQ ID NO: 10464 - RNA, 19 nt, synthetic construct
  source 1..19: mol_type = other RNA
taaagacgtcatagtctgc

SEQ ID NO: 10465 - RNA, 19 nt, synthetic construct
  source 1..19: mol_type = other RNA
ctaaagacgtcatagtctg

SEQ ID NO: 10466 - RNA, 19 nt, synthetic construct
  source 1..19: mol_type = other RNA
gctaaagacgtcatagtct

SEQ ID NO: 10467 - RNA, 19 nt, synthetic construct
  source 1..19: mol_type = other RNA
agctaaagacgtcatagtc

SEQ ID NO: 10468 - RNA, 19 nt, synthetic construct
  source 1..19: mol_type = other RNA
tagctaaagacgtcatagt

SEQ ID NO: 10469 - RNA, 19 nt, synthetic construct
  source 1..19: mol_type = other RNA
ttagctaaagacgtcatag

SEQ ID NO: 10470 - RNA, 19 nt, synthetic construct
  source 1..19: mol_type = other RNA
attagctaaagacgtcata

SEQ ID NO: 10471 - RNA, 19 nt, synthetic construct
  source 1..19: mol_type = other RNA
cattagctaaagacgtcat

SEQ ID NO: 10472 - RNA, 19 nt, synthetic construct
  source 1..19: mol_type = other RNA
tcattagctaaagacgtca

SEQ ID NO: 10473 - RNA, 19 nt, synthetic construct
  source 1..19: mol_type = other RNA
ttcattagctaaagacgtc

SEQ ID NO: 10474 - RNA, 19 nt, synthetic construct
  source 1..19: mol_type = other RNA
attcattagctaaagacgt

SEQ ID NO: 10475 - RNA, 19 nt, synthetic construct
  source 1..19: mol_type = other RNA
aattcattagctaaagacg

SEQ ID NO: 10476 - RNA, 19 nt, synthetic construct
  source 1..19: mol_type = other RNA
caattcattagctaaagac

SEQ ID NO: 10477 - RNA, 19 nt, synthetic construct
  source 1..19: mol_type = other RNA
gcaattcattagctaaaga

SEQ ID NO: 10478 - RNA, 19 nt, synthetic construct
  source 1..19: mol_type = other RNA
ggcaattcattagctaaag

SEQ ID NO: 10479 - RNA, 19 nt, synthetic construct
  source 1..19: mol_type = other RNA
aggcaattcattagctaaa

SEQ ID NO: 10480 - RNA, 19 nt, synthetic construct
  source 1..19: mol_type = other RNA
taggcaattcattagctaa

SEQ ID NO: 10481 - RNA, 19 nt, synthetic construct
  source 1..19: mol_type = other RNA
ataggcaattcattagcta

SEQ ID NO: 10482 - RNA, 19 nt, synthetic construct
  source 1..19: mol_type = other RNA
aataggcaattcattagct

SEQ ID NO: 10483 - RNA, 19 nt, synthetic construct
  source 1..19: mol_type = other RNA
caataggcaattcattagc

SEQ ID NO: 10484 - RNA, 19 nt, synthetic construct
  source 1..19: mol_type = other RNA
acaataggcaattcattag

SEQ ID NO: 10485 - RNA, 19 nt, synthetic construct
  source 1..19: mol_type = other RNA
aacaataggcaattcatta

SEQ ID NO: 10486 - RNA, 19 nt, synthetic construct
  source 1..19: mol_type = other RNA
taacaataggcaattcatt

SEQ ID NO: 10487 - RNA, 19 nt, synthetic construct
  source 1..19: mol_type = other RNA
ataacaataggcaattcat

SEQ ID NO: 10488 - RNA, 19 nt, synthetic construct
  source 1..19: mol_type = other RNA
cataacaataggcaattca

SEQ ID NO: 10489 - RNA, 19 nt, synthetic construct
  source 1..19: mol_type = other RNA
ccataacaataggcaattc

SEQ ID NO: 10490 - RNA, 19 nt, synthetic construct
  source 1..19: mol_type = other RNA
tccataacaataggcaatt

SEQ ID NO: 10491 - RNA, 19 nt, synthetic construct
  source 1..19: mol_type = other RNA
ttccataacaataggcaat

SEQ ID NO: 10492 - RNA, 19 nt, synthetic construct
  source 1..19: mol_type = other RNA
tttccataacaataggcaa

SEQ ID NO: 10493 - RNA, 19 nt, synthetic construct
  source 1..19: mol_type = other RNA
ttttccataacaataggca

SEQ ID NO: 10494 - RNA, 19 nt, synthetic construct
  source 1..19: mol_type = other RNA
gttttccataacaataggc

SEQ ID NO: 10495 - RNA, 19 nt, synthetic construct
  source 1..19: mol_type = other RNA
tgttttccataacaatagg

SEQ ID NO: 10496 - RNA, 19 nt, synthetic construct
  source 1..19: mol_type = other RNA
ctgttttccataacaatag

SEQ ID NO: 10497 - RNA, 19 nt, synthetic construct
  source 1..19: mol_type = other RNA
actgttttccataacaata

SEQ ID NO: 10498 - RNA, 19 nt, synthetic construct
  source 1..19: mol_type = other RNA
aactgttttccataacaat

SEQ ID NO: 10499 - RNA, 19 nt, synthetic construct
  source 1..19: mol_type = other RNA
taactgttttccataacaa

SEQ ID NO: 10500 - RNA, 19 nt, synthetic construct
  source 1..19: mol_type = other RNA
ttaactgttttccataaca

SEQ ID NO: 10501 - RNA, 19 nt, synthetic construct
  source 1..19: mol_type = other RNA
attaactgttttccataac

SEQ ID NO: 10502 - RNA, 19 nt, synthetic construct
  source 1..19: mol_type = other RNA
tattaactgttttccataa

SEQ ID NO: 10503 - RNA, 19 nt, synthetic construct
  source 1..19: mol_type = other RNA
atattaactgttttccata

SEQ ID NO: 10504 - RNA, 19 nt, synthetic construct
  source 1..19: mol_type = other RNA
catattaactgttttccat

SEQ ID NO: 10505 - RNA, 19 nt, synthetic construct
  source 1..19: mol_type = other RNA
gcatattaactgttttcca

SEQ ID NO: 10506 - RNA, 19 nt, synthetic construct
  source 1..19: mol_type = other RNA
ggcatattaactgttttcc

SEQ ID NO: 10507 - RNA, 19 nt, synthetic construct
  source 1..19: mol_type = other RNA
tggcatattaactgttttc

SEQ ID NO: 10508 - RNA, 19 nt, synthetic construct
  source 1..19: mol_type = other RNA
atggcatattaactgtttt

SEQ ID NO: 10509 - RNA, 19 nt, synthetic construct
  source 1..19: mol_type = other RNA
catggcatattaactgttt

SEQ ID NO: 10510 - RNA, 19 nt, synthetic construct
  source 1..19: mol_type = other RNA
acatggcatattaactgtt

SEQ ID NO: 10511 - RNA, 19 nt, synthetic construct
  source 1..19: mol_type = other RNA
tacatggcatattaactgt

SEQ ID NO: 10512 - RNA, 19 nt, synthetic construct
  source 1..19: mol_type = other RNA
atacatggcatattaactg

SEQ ID NO: 10513 - RNA, 19 nt, synthetic construct
  source 1..19: mol_type = other RNA
catacatggcatattaact

SEQ ID NO: 10514 - RNA, 19 nt, synthetic construct
  source 1..19: mol_type = other RNA
acatacatggcatattaac

SEQ ID NO: 10515 - RNA, 19 nt, synthetic construct
  source 1..19: mol_type = other RNA
tacatacatggcatattaa

SEQ ID NO: 10516 - RNA, 19 nt, synthetic construct
  source 1..19: mol_type = other RNA
gtacatacatggcatatta

SEQ ID NO: 10517 - RNA, 19 nt, synthetic construct
  source 1..19: mol_type = other RNA
tgtacatacatggcatatt

SEQ ID NO: 10518 - RNA, 19 nt, synthetic construct
  source 1..19: mol_type = other RNA
ctgtacatacatggcatat

SEQ ID NO: 10519 - RNA, 19 nt, synthetic construct
  source 1..19: mol_type = other RNA
actgtacatacatggcata

SEQ ID NO: 10520 - RNA, 19 nt, synthetic construct
  source 1..19: mol_type = other RNA
aactgtacatacatggcat

SEQ ID NO: 10521 - RNA, 19 nt, synthetic construct
  source 1..19: mol_type = other RNA
aaactgtacatacatggca

SEQ ID NO: 10522 - RNA, 19 nt, synthetic construct
  source 1..19: mol_type = other RNA
aaaactgtacatacatggc

SEQ ID NO: 10523 - RNA, 19 nt, synthetic construct
  source 1..19: mol_type = other RNA
caaaactgtacatacatgg

SEQ ID NO: 10524 - RNA, 19 nt, synthetic construct
  source 1..19: mol_type = other RNA
acaaaactgtacatacatg

SEQ ID NO: 10525 - RNA, 19 nt, synthetic construct
  source 1..19: mol_type = other RNA
aacaaaactgtacatacat

SEQ ID NO: 10526 - RNA, 19 nt, synthetic construct
  source 1..19: mol_type = other RNA
aaacaaaactgtacataca

SEQ ID NO: 10527 - RNA, 19 nt, synthetic construct
  source 1..19: mol_type = other RNA
taaacaaaactgtacatac

SEQ ID NO: 10528 - RNA, 19 nt, synthetic construct
  source 1..19: mol_type = other RNA
ataaacaaaactgtacata

SEQ ID NO: 10529 - RNA, 19 nt, synthetic construct
  source 1..19: mol_type = other RNA
tataaacaaaactgtacat

SEQ ID NO: 10530 - RNA, 19 nt, synthetic construct
  source 1..19: mol_type = other RNA
atataaacaaaactgtaca

SEQ ID NO: 10531 - RNA, 19 nt, synthetic construct
  source 1..19: mol_type = other RNA
aatataaacaaaactgtac

SEQ ID NO: 10532 - RNA, 19 nt, synthetic construct
  source 1..19: mol_type = other RNA
caatataaacaaaactgta

SEQ ID NO: 10533 - RNA, 19 nt, synthetic construct
  source 1..19: mol_type = other RNA
acaatataaacaaaactgt

SEQ ID NO: 10534 - RNA, 19 nt, synthetic construct
  source 1..19: mol_type = other RNA
tacaatataaacaaaactg

SEQ ID NO: 10535 - RNA, 19 nt, synthetic construct
  source 1..19: mol_type = other RNA
atacaatataaacaaaact

SEQ ID NO: 10536 - RNA, 19 nt, synthetic construct
  source 1..19: mol_type = other RNA
tatacaatataaacaaaac

SEQ ID NO: 10537 - RNA, 19 nt, synthetic construct
  source 1..19: mol_type = other RNA
atatacaatataaacaaaa

SEQ ID NO: 10538 - RNA, 19 nt, synthetic construct
  source 1..19: mol_type = other RNA
aatatacaatataaacaaa

SEQ ID NO: 10539 - RNA, 19 nt, synthetic construct
  source 1..19: mol_type = other RNA
aaatatacaatataaacaa

SEQ ID NO: 10540 - RNA, 19 nt, synthetic construct
  source 1..19: mol_type = other RNA
taaatatacaatataaaca

SEQ ID NO: 10541 - RNA, 19 nt, synthetic construct
  source 1..19: mol_type = other RNA
ttaaatatacaatataaac

SEQ ID NO: 10542 - RNA, 19 nt, synthetic construct
  source 1..19: mol_type = other RNA
tttaaatatacaatataaa

SEQ ID NO: 10543 - RNA, 19 nt, synthetic construct
  source 1..19: mol_type = other RNA
ctttaaatatacaatataa

SEQ ID NO: 10544 - RNA, 19 nt, synthetic construct
  source 1..19: mol_type = other RNA
tctttaaatatacaatata

SEQ ID NO: 10545 - RNA, 19 nt, synthetic construct
  source 1..19: mol_type = other RNA
atctttaaatatacaatat

SEQ ID NO: 10546 - RNA, 19 nt, synthetic construct
  source 1..19: mol_type = other RNA
tatctttaaatatacaata

SEQ ID NO: 10547 - RNA, 19 nt, synthetic construct
  source 1..19: mol_type = other RNA
gtatctttaaatatacaat

SEQ ID NO: 10548 - RNA, 19 nt, synthetic construct
  source 1..19: mol_type = other RNA
agtatctttaaatatacaa

SEQ ID NO: 10549 - RNA, 19 nt, synthetic construct
  source 1..19: mol_type = other RNA
cagtatctttaaatataca

SEQ ID NO: 10550 - RNA, 19 nt, synthetic construct
  source 1..19: mol_type = other RNA
gcagtatctttaaatatac

SEQ ID NO: 10551 - RNA, 19 nt, synthetic construct
  source 1..19: mol_type = other RNA
agcagtatctttaaatata

SEQ ID NO: 10552 - RNA, 19 nt, synthetic construct
  source 1..19: mol_type = other RNA
tagcagtatctttaaatat

SEQ ID NO: 10553 - RNA, 19 nt, synthetic construct
  source 1..19: mol_type = other RNA
ttagcagtatctttaaata

SEQ ID NO: 10554 - RNA, 19 nt, synthetic construct
  source 1..19: mol_type = other RNA
attagcagtatctttaaat

SEQ ID NO: 10555 - RNA, 19 nt, synthetic construct
  source 1..19: mol_type = other RNA
tattagcagtatctttaaa

SEQ ID NO: 10556 - RNA, 19 nt, synthetic construct
  source 1..19: mol_type = other RNA
ttattagcagtatctttaa

SEQ ID NO: 10557 - RNA, 19 nt, synthetic construct
  source 1..19: mol_type = other RNA
gttattagcagtatcttta

SEQ ID NO: 10558 - RNA, 19 nt, synthetic construct
  source 1..19: mol_type = other RNA
ggttattagcagtatcttt

SEQ ID NO: 10559 - RNA, 19 nt, synthetic construct
  source 1..19: mol_type = other RNA
aggttattagcagtatctt

SEQ ID NO: 10560 - RNA, 19 nt, synthetic construct
  source 1..19: mol_type = other RNA
taggttattagcagtatct

SEQ ID NO: 10561 - RNA, 19 nt, synthetic construct
  source 1..19: mol_type = other RNA
ataggttattagcagtatc

SEQ ID NO: 10562 - RNA, 19 nt, synthetic construct
  source 1..19: mol_type = other RNA
tataggttattagcagtat

SEQ ID NO: 10563 - RNA, 19 nt, synthetic construct
  source 1..19: mol_type = other RNA
atataggttattagcagta

SEQ ID NO: 10564 - RNA, 19 nt, synthetic construct
  source 1..19: mol_type = other RNA
tatataggttattagcagt

SEQ ID NO: 10565 - RNA, 19 nt, synthetic construct
  source 1..19: mol_type = other RNA
ttatataggttattagcag

SEQ ID NO: 10566 - RNA, 19 nt, synthetic construct
  source 1..19: mol_type = other RNA
tttatataggttattagca

SEQ ID NO: 10567 - RNA, 19 nt, synthetic construct
  source 1..19: mol_type = other RNA
atttatataggttattagc

SEQ ID NO: 10568 - RNA, 19 nt, synthetic construct
  source 1..19: mol_type = other RNA
aatttatataggttattag

SEQ ID NO: 10569 - RNA, 19 nt, synthetic construct
  source 1..19: mol_type = other RNA
aaatttatataggttatta

SEQ ID NO: 10570 - RNA, 19 nt, synthetic construct
  source 1..19: mol_type = other RNA
taaatttatataggttatt

SEQ ID NO: 10571 - RNA, 19 nt, synthetic construct
  source 1..19: mol_type = other RNA
ttaaatttatataggttat

SEQ ID NO: 10572 - RNA, 19 nt, synthetic construct
  source 1..19: mol_type = other RNA
cttaaatttatataggtta

SEQ ID NO: 10573 - RNA, 19 nt, synthetic construct
  source 1..19: mol_type = other RNA
acttaaatttatataggtt

SEQ ID NO: 10574 - RNA, 19 nt, synthetic construct
  source 1..19: mol_type = other RNA
cacttaaatttatataggt

SEQ ID NO: 10575 - RNA, 19 nt, synthetic construct
  source 1..19: mol_type = other RNA
tcacttaaatttatatagg

SEQ ID NO: 10576 - RNA, 19 nt, synthetic construct
  source 1..19: mol_type = other RNA
gtcacttaaatttatatag

SEQ ID NO: 10577 - RNA, 19 nt, synthetic construct
  source 1..19: mol_type = other RNA
agtcacttaaatttatata

SEQ ID NO: 10578 - RNA, 19 nt, synthetic construct
  source 1..19: mol_type = other RNA
aagtcacttaaatttatat

SEQ ID NO: 10579 - RNA, 19 nt, synthetic construct
  source 1..19: mol_type = other RNA
caagtcacttaaatttata

SEQ ID NO: 10580 - RNA, 19 nt, synthetic construct
  source 1..19: mol_type = other RNA
tcaagtcacttaaatttat

SEQ ID NO: 10581 - RNA, 19 nt, synthetic construct
  source 1..19: mol_type = other RNA
ctcaagtcacttaaattta

SEQ ID NO: 10582 - RNA, 19 nt, synthetic construct
  source 1..19: mol_type = other RNA
cctcaagtcacttaaattt

SEQ ID NO: 10583 - RNA, 19 nt, synthetic construct
  source 1..19: mol_type = other RNA
gcctcaagtcacttaaatt

SEQ ID NO: 10584 - RNA, 19 nt, synthetic construct
  source 1..19: mol_type = other RNA
ggcctcaagtcacttaaat

SEQ ID NO: 10585 - RNA, 19 nt, synthetic construct
  source 1..19: mol_type = other RNA
aggcctcaagtcacttaaa

SEQ ID NO: 10586 - RNA, 19 nt, synthetic construct
  source 1..19: mol_type = other RNA
taggcctcaagtcacttaa

SEQ ID NO: 10587 - RNA, 19 nt, synthetic construct
  source 1..19: mol_type = other RNA
ataggcctcaagtcactta

SEQ ID NO: 10588 - RNA, 19 nt, synthetic construct
  source 1..19: mol_type = other RNA
tataggcctcaagtcactt

SEQ ID NO: 10589 - RNA, 19 nt, synthetic construct
  source 1..19: mol_type = other RNA
ttataggcctcaagtcact

SEQ ID NO: 10590 - RNA, 19 nt, synthetic construct
  source 1..19: mol_type = other RNA
attataggcctcaagtcac

SEQ ID NO: 10591 - RNA, 19 nt, synthetic construct
  source 1..19: mol_type = other RNA
tattataggcctcaagtca

SEQ ID NO: 10592 - RNA, 19 nt, synthetic construct
  source 1..19: mol_type = other RNA
gtattataggcctcaagtc

SEQ ID NO: 10593 - RNA, 19 nt, synthetic construct
  source 1..19: mol_type = other RNA
tgtattataggcctcaagt

SEQ ID NO: 10594 - RNA, 19 nt, synthetic construct
  source 1..19: mol_type = other RNA
ttgtattataggcctcaag

SEQ ID NO: 10595 - RNA, 19 nt, synthetic construct
  source 1..19: mol_type = other RNA
attgtattataggcctcaa

SEQ ID NO: 10596 - RNA, 19 nt, synthetic construct
  source 1..19: mol_type = other RNA
gattgtattataggcctca

SEQ ID NO: 10597 - RNA, 19 nt, synthetic construct
  source 1..19: mol_type = other RNA
agattgtattataggcctc

SEQ ID NO: 10598 - RNA, 19 nt, synthetic construct
  source 1..19: mol_type = other RNA
cagattgtattataggcct

SEQ ID NO: 10599 - RNA, 19 nt, synthetic construct
  source 1..19: mol_type = other RNA
gcagattgtattataggcc

SEQ ID NO: 10600 - RNA, 19 nt, synthetic construct
  source 1..19: mol_type = other RNA
agcagattgtattataggc

SEQ ID NO: 10601 - RNA, 19 nt, synthetic construct
  source 1..19: mol_type = other RNA
tagcagattgtattatagg

SEQ ID NO: 10602 - RNA, 19 nt, synthetic construct
  source 1..19: mol_type = other RNA
gtagcagattgtattatag

SEQ ID NO: 10603 - RNA, 19 nt, synthetic construct
  source 1..19: mol_type = other RNA
agtagcagattgtattata

SEQ ID NO: 10604 - RNA, 19 nt, synthetic construct
  source 1..19: mol_type = other RNA
aagtagcagattgtattat

SEQ ID NO: 10605 - RNA, 19 nt, synthetic construct
  source 1..19: mol_type = other RNA
aaagtagcagattgtatta

SEQ ID NO: 10606 - RNA, 19 nt, synthetic construct
  source 1..19: mol_type = other RNA
taaagtagcagattgtatt

SEQ ID NO: 10607 - RNA, 19 nt, synthetic construct
  source 1..19: mol_type = other RNA
gtaaagtagcagattgtat

SEQ ID NO: 10608 - RNA, 19 nt, synthetic construct
  source 1..19: mol_type = other RNA
agtaaagtagcagattgta

SEQ ID NO: 10609 - RNA, 19 nt, synthetic construct
  source 1..19: mol_type = other RNA
tagtaaagtagcagattgt

SEQ ID NO: 10610 - RNA, 19 nt, synthetic construct
  source 1..19: mol_type = other RNA
ttagtaaagtagcagattg

SEQ ID NO: 10611 - RNA, 19 nt, synthetic construct
  source 1..19: mol_type = other RNA
attagtaaagtagcagatt

SEQ ID NO: 10612 - RNA, 19 nt, synthetic construct
  source 1..19: mol_type = other RNA
aattagtaaagtagcagat

SEQ ID NO: 10613 - RNA, 19 nt, synthetic construct
  source 1..19: mol_type = other RNA
gaattagtaaagtagcaga

SEQ ID NO: 10614 - RNA, 19 nt, synthetic construct
  source 1..19: mol_type = other RNA
tgaattagtaaagtagcag

SEQ ID NO: 10615 - RNA, 19 nt, synthetic construct
  source 1..19: mol_type = other RNA
atgaattagtaaagtagca

SEQ ID NO: 10616 - RNA, 19 nt, synthetic construct
  source 1..19: mol_type = other RNA
tatgaattagtaaagtagc

SEQ ID NO: 10617 - RNA, 19 nt, synthetic construct
  source 1..19: mol_type = other RNA
ttatgaattagtaaagtag

SEQ ID NO: 10618 - RNA, 19 nt, synthetic construct
  source 1..19: mol_type = other RNA
tttatgaattagtaaagta

SEQ ID NO: 10619 - RNA, 19 nt, synthetic construct
  source 1..19: mol_type = other RNA
atttatgaattagtaaagt

SEQ ID NO: 10620 - RNA, 19 nt, synthetic construct
  source 1..19: mol_type = other RNA
aatttatgaattagtaaag

SEQ ID NO: 10621 - RNA, 19 nt, synthetic construct
  source 1..19: mol_type = other RNA
gaatttatgaattagtaaa

SEQ ID NO: 10622 - RNA, 19 nt, synthetic construct
  source 1..19: mol_type = other RNA
tgaatttatgaattagtaa

SEQ ID NO: 10623 - RNA, 19 nt, synthetic construct
  source 1..19: mol_type = other RNA
ttgaatttatgaattagta

SEQ ID NO: 10624 - RNA, 19 nt, synthetic construct
  source 1..19: mol_type = other RNA
tttgaatttatgaattagt

SEQ ID NO: 10625 - RNA, 19 nt, synthetic construct
  source 1..19: mol_type = other RNA
ttttgaatttatgaattag

SEQ ID NO: 10626 - RNA, 19 nt, synthetic construct
  source 1..19: mol_type = other RNA
tttttgaatttatgaatta

SEQ ID NO: 10627 - RNA, 19 nt, synthetic construct
  source 1..19: mol_type = other RNA
ttttttgaatttatgaatt

SEQ ID NO: 10628 - RNA, 19 nt, synthetic construct
  source 1..19: mol_type = other RNA
tttttttgaatttatgaat

SEQ ID NO: 10629 - RNA, 19 nt, synthetic construct
  source 1..19: mol_type = other RNA
ttttttttgaatttatgaa

SEQ ID NO: 10630 - RNA, 19 nt, synthetic construct
  source 1..19: mol_type = other RNA
attttttttgaatttatga

SEQ ID NO: 10631 - RNA, 19 nt, synthetic construct
  source 1..19: mol_type = other RNA
aattttttttgaatttatg

SEQ ID NO: 10632 - RNA, 19 nt, synthetic construct
  source 1..19: mol_type = other RNA
gaattttttttgaatttat

SEQ ID NO: 10633 - RNA, 19 nt, synthetic construct
  source 1..19: mol_type = other RNA
agaattttttttgaattta

SEQ ID NO: 10634 - RNA, 19 nt, synthetic construct
  source 1..19: mol_type = other RNA
tagaattttttttgaattt

SEQ ID NO: 10635 - RNA, 19 nt, synthetic construct
  source 1..19: mol_type = other RNA
atagaattttttttgaatt

SEQ ID NO: 10636 - RNA, 19 nt, synthetic construct
  source 1..19: mol_type = other RNA
catagaattttttttgaat

SEQ ID NO: 10637 - RNA, 19 nt, synthetic construct
  source 1..19: mol_type = other RNA
ccatagaattttttttgaa

SEQ ID NO: 10638 - RNA, 19 nt, synthetic construct
  source 1..19: mol_type = other RNA
gccatagaattttttttga

SEQ ID NO: 10639 - RNA, 19 nt, synthetic construct
  source 1..19: mol_type = other RNA
tgccatagaattttttttg

SEQ ID NO: 10640 - RNA, 19 nt, synthetic construct
  source 1..19: mol_type = other RNA
atgccatagaatttttttt

SEQ ID NO: 10641 - RNA, 19 nt, synthetic construct
  source 1..19: mol_type = other RNA
tatgccatagaattttttt

SEQ ID NO: 10642 - RNA, 19 nt, synthetic construct
  source 1..19: mol_type = other RNA
ctatgccatagaatttttt

SEQ ID NO: 10643 - RNA, 19 nt, synthetic construct
  source 1..19: mol_type = other RNA
cctatgccatagaattttt

SEQ ID NO: 10644 - RNA, 19 nt, synthetic construct
  source 1..19: mol_type = other RNA
tcctatgccatagaatttt

SEQ ID NO: 10645 - RNA, 19 nt, synthetic construct
  source 1..19: mol_type = other RNA
ttcctatgccatagaattt

SEQ ID NO: 10646 - RNA, 19 nt, synthetic construct
  source 1..19: mol_type = other RNA
gttcctatgccatagaatt

SEQ ID NO: 10647 - RNA, 19 nt, synthetic construct
  source 1..19: mol_type = other RNA
ggttcctatgccatagaat

SEQ ID NO: 10648 - RNA, 19 nt, synthetic construct
  source 1..19: mol_type = other RNA
tggttcctatgccatagaa

SEQ ID NO: 10649 - RNA, 19 nt, synthetic construct
  source 1..19: mol_type = other RNA
ttggttcctatgccataga

SEQ ID NO: 10650 - RNA, 19 nt, synthetic construct
  source 1..19: mol_type = other RNA
gttggttcctatgccatag

SEQ ID NO: 10651 - RNA, 19 nt, synthetic construct
  source 1..19: mol_type = other RNA
agttggttcctatgccata

SEQ ID NO: 10652 - RNA, 19 nt, synthetic construct
  source 1..19: mol_type = other RNA
cagttggttcctatgccat

SEQ ID NO: 10653 - RNA, 19 nt, synthetic construct
  source 1..19: mol_type = other RNA
gcagttggttcctatgcca

SEQ ID NO: 10654 - RNA, 19 nt, synthetic construct
  source 1..19: mol_type = other RNA
ggcagttggttcctatgcc

SEQ ID NO: 10655 - RNA, 19 nt, synthetic construct
  source 1..19: mol_type = other RNA
aggcagttggttcctatgc

SEQ ID NO: 10656 - RNA, 19 nt, synthetic construct
  source 1..19: mol_type = other RNA
aaggcagttggttcctatg

SEQ ID NO: 10657 - RNA, 19 nt, synthetic construct
  source 1..19: mol_type = other RNA
caaggcagttggttcctat

SEQ ID NO: 10658 - RNA, 19 nt, synthetic construct
  source 1..19: mol_type = other RNA
gcaaggcagttggttccta

SEQ ID NO: 10659 - RNA, 19 nt, synthetic construct
  source 1..19: mol_type = other RNA
ggcaaggcagttggttcct

SEQ ID NO: 10660 - RNA, 19 nt, synthetic construct
  source 1..19: mol_type = other RNA
aggcaaggcagttggttcc

SEQ ID NO: 10661 - RNA, 19 nt, synthetic construct
  source 1..19: mol_type = other RNA
aaggcaaggcagttggttc

SEQ ID NO: 10662 - RNA, 19 nt, synthetic construct
  source 1..19: mol_type = other RNA
gaaggcaaggcagttggtt

SEQ ID NO: 10663 - RNA, 19 nt, synthetic construct
  source 1..19: mol_type = other RNA
tgaaggcaaggcagttggt

SEQ ID NO: 10664 - RNA, 19 nt, synthetic construct
  source 1..19: mol_type = other RNA
ttgaaggcaaggcagttgg

SEQ ID NO: 10665 - RNA, 19 nt, synthetic construct
  source 1..19: mol_type = other RNA
cttgaaggcaaggcagttg

SEQ ID NO: 10666 - RNA, 19 nt, synthetic construct
  source 1..19: mol_type = other RNA
tcttgaaggcaaggcagtt

SEQ ID NO: 10667 - RNA, 19 nt, synthetic construct
  source 1..19: mol_type = other RNA
gtcttgaaggcaaggcagt

SEQ ID NO: 10668 - RNA, 19 nt, synthetic construct
  source 1..19: mol_type = other RNA
ggtcttgaaggcaaggcag

SEQ ID NO: 10669 - RNA, 19 nt, synthetic construct
  source 1..19: mol_type = other RNA
aggtcttgaaggcaaggca

SEQ ID NO: 10670 - RNA, 19 nt, synthetic construct
  source 1..19: mol_type = other RNA
taggtcttgaaggcaaggc

SEQ ID NO: 10671 - RNA, 19 nt, synthetic construct
  source 1..19: mol_type = other RNA
ctaggtcttgaaggcaagg

SEQ ID NO: 10672 - RNA, 19 nt, synthetic construct
  source 1..19: mol_type = other RNA
actaggtcttgaaggcaag

SEQ ID NO: 10673 - RNA, 19 nt, synthetic construct
  source 1..19: mol_type = other RNA
tactaggtcttgaaggcaa

SEQ ID NO: 10674 - RNA, 19 nt, synthetic construct
  source 1..19: mol_type = other RNA
ttactaggtcttgaaggca

SEQ ID NO: 10675 - RNA, 19 nt, synthetic construct
  source 1..19: mol_type = other RNA
gttactaggtcttgaaggc

SEQ ID NO: 10676 - RNA, 19 nt, synthetic construct
  source 1..19: mol_type = other RNA
agttactaggtcttgaagg

SEQ ID NO: 10677 - RNA, 19 nt, synthetic construct
  source 1..19: mol_type = other RNA
aagttactaggtcttgaag

SEQ ID NO: 10678 - RNA, 19 nt, synthetic construct
  source 1..19: mol_type = other RNA
aaagttactaggtcttgaa

SEQ ID NO: 10679 - RNA, 19 nt, synthetic construct
  source 1..19: mol_type = other RNA
gaaagttactaggtcttga

SEQ ID NO: 10680 - RNA, 19 nt, synthetic construct
  source 1..19: mol_type = other RNA
agaaagttactaggtcttg

SEQ ID NO: 10681 - RNA, 19 nt, synthetic construct
  source 1..19: mol_type = other RNA
gagaaagttactaggtctt

SEQ ID NO: 10682 - RNA, 19 nt, synthetic construct
  source 1..19: mol_type = other RNA
agagaaagttactaggtct

SEQ ID NO: 10683 - RNA, 19 nt, synthetic construct
  source 1..19: mol_type = other RNA
tagagaaagttactaggtc

SEQ ID NO: 10684 - RNA, 19 nt, synthetic construct
  source 1..19: mol_type = other RNA
atagagaaagttactaggt

SEQ ID NO: 10685 - RNA, 19 nt, synthetic construct
  source 1..19: mol_type = other RNA
tatagagaaagttactagg

SEQ ID NO: 10686 - RNA, 19 nt, synthetic construct
  source 1..19: mol_type = other RNA
ttatagagaaagttactag

SEQ ID NO: 10687 - RNA, 19 nt, synthetic construct
  source 1..19: mol_type = other RNA
tttatagagaaagttacta

SEQ ID NO: 10688 - RNA, 19 nt, synthetic construct
  source 1..19: mol_type = other RNA
atttatagagaaagttact

SEQ ID NO: 10689 - RNA, 19 nt, synthetic construct
  source 1..19: mol_type = other RNA
gatttatagagaaagttac

SEQ ID NO: 10690 - RNA, 19 nt, synthetic construct
  source 1..19: mol_type = other RNA
agatttatagagaaagtta

SEQ ID NO: 10691 - RNA, 19 nt, synthetic construct
  source 1..19: mol_type = other RNA
gagatttatagagaaagtt

SEQ ID NO: 10692 - RNA, 19 nt, synthetic construct
  source 1..19: mol_type = other RNA
cgagatttatagagaaagt

SEQ ID NO: 10693 - RNA, 19 nt, synthetic construct
  source 1..19: mol_type = other RNA
acgagatttatagagaaag

SEQ ID NO: 10694 - RNA, 19 nt, synthetic construct
  source 1..19: mol_type = other RNA
cacgagatttatagagaaa

SEQ ID NO: 10695 - RNA, 19 nt, synthetic construct
  source 1..19: mol_type = other RNA
acacgagatttatagagaa

SEQ ID NO: 10696 - RNA, 19 nt, synthetic construct
  source 1..19: mol_type = other RNA
aacacgagatttatagaga

SEQ ID NO: 10697 - RNA, 19 nt, synthetic construct
  source 1..19: mol_type = other RNA
taacacgagatttatagag

SEQ ID NO: 10698 - RNA, 19 nt, synthetic construct
  source 1..19: mol_type = other RNA
ttaacacgagatttataga

SEQ ID NO: 10699 - RNA, 19 nt, synthetic construct
  source 1..19: mol_type = other RNA
gttaacacgagatttatag

SEQ ID NO: 10700 - RNA, 19 nt, synthetic construct
  source 1..19: mol_type = other RNA
agttaacacgagatttata

SEQ ID NO: 10701 - RNA, 19 nt, synthetic construct
  source 1..19: mol_type = other RNA
cagttaacacgagatttat

SEQ ID NO: 10702 - RNA, 19 nt, synthetic construct
  source 1..19: mol_type = other RNA
tcagttaacacgagattta

SEQ ID NO: 10703 - RNA, 19 nt, synthetic construct
  source 1..19: mol_type = other RNA
ttcagttaacacgagattt

SEQ ID NO: 10704 - RNA, 19 nt, synthetic construct
  source 1..19: mol_type = other RNA
tttcagttaacacgagatt

SEQ ID NO: 10705 - RNA, 19 nt, synthetic construct
  source 1..19: mol_type = other RNA
atttcagttaacacgagat

SEQ ID NO: 10706 - RNA, 19 nt, synthetic construct
  source 1..19: mol_type = other RNA
aatttcagttaacacgaga

SEQ ID NO: 10707 - RNA, 19 nt, synthetic construct
  source 1..19: mol_type = other RNA
aaatttcagttaacacgag

SEQ ID NO: 10708 - RNA, 19 nt, synthetic construct
  source 1..19: mol_type = other RNA
aaaatttcagttaacacga

SEQ ID NO: 10709 - RNA, 19 nt, synthetic construct
  source 1..19: mol_type = other RNA
aaaaatttcagttaacacg

SEQ ID NO: 10710 - RNA, 19 nt, synthetic construct
  source 1..19: mol_type = other RNA
aaaaaatttcagttaacac

SEQ ID NO: 10711 - RNA, 19 nt, synthetic construct
  source 1..19: mol_type = other RNA
aaaaaaatttcagttaaca

SEQ ID NO: 10712 - RNA, 19 nt, synthetic construct
  source 1..19: mol_type = other RNA
aaaaaaaatttcagttaac

SEQ ID NO: 10713 - RNA, 19 nt, synthetic construct
  source 1..19: mol_type = other RNA
taaaaaaaatttcagttaa

SEQ ID NO: 10714 - RNA, 19 nt, synthetic construct
  source 1..19: mol_type = other RNA
ttaaaaaaaatttcagtta

SEQ ID NO: 10715 - RNA, 19 nt, synthetic construct
  source 1..19: mol_type = other RNA
tttaaaaaaaatttcagtt

SEQ ID NO: 10716 - RNA, 19 nt, synthetic construct
  source 1..19: mol_type = other RNA
atttaaaaaaaatttcagt

SEQ ID NO: 10717 - RNA, 19 nt, synthetic construct
  source 1..19: mol_type = other RNA
tatttaaaaaaaatttcag

SEQ ID NO: 10718 - RNA, 19 nt, synthetic construct
  source 1..19: mol_type = other RNA
atatttaaaaaaaatttca

SEQ ID NO: 10719 - RNA, 19 nt, synthetic construct
  source 1..19: mol_type = other RNA
tatatttaaaaaaaatttc

SEQ ID NO: 10720 - RNA, 19 nt, synthetic construct
  source 1..19: mol_type = other RNA
atatatttaaaaaaaattt

SEQ ID NO: 10721 - RNA, 19 nt, synthetic construct
  source 1..19: mol_type = other RNA
aatatatttaaaaaaaatt

SEQ ID NO: 10722 - RNA, 19 nt, synthetic construct
  source 1..19: mol_type = other RNA
aaatatatttaaaaaaaat

SEQ ID NO: 10723 - RNA, 19 nt, synthetic construct
  source 1..19: mol_type = other RNA
aaaatatatttaaaaaaaa

SEQ ID NO: 10724 - RNA, 19 nt, synthetic construct
  source 1..19: mol_type = other RNA
aaaaatatatttaaaaaaa

SEQ ID NO: 10725 - RNA, 19 nt, synthetic construct
  source 1..19: mol_type = other RNA
aaaaaatatatttaaaaaa

SEQ ID NO: 10726 - RNA, 19 nt, synthetic construct
  source 1..19: mol_type = other RNA
taaaaaatatatttaaaaa

SEQ ID NO: 10727 - RNA, 19 nt, synthetic construct
  source 1..19: mol_type = other RNA
ctaaaaaatatatttaaaa

SEQ ID NO: 10728 - RNA, 19 nt, synthetic construct
  source 1..19: mol_type = other RNA
tctaaaaaatatatttaaa

SEQ ID NO: 10729 - RNA, 19 nt, synthetic construct
  source 1..19: mol_type = other RNA
atctaaaaaatatatttaa

SEQ ID NO: 10730 - RNA, 19 nt, synthetic construct
  source 1..19: mol_type = other RNA
aatctaaaaaatatattta

SEQ ID NO: 10731 - RNA, 19 nt, synthetic construct
  source 1..19: mol_type = other RNA
caatctaaaaaatatattt

SEQ ID NO: 10732 - RNA, 19 nt, synthetic construct
  source 1..19: mol_type = other RNA
ccaatctaaaaaatatatt

SEQ ID NO: 10733 - RNA, 19 nt, synthetic construct
  source 1..19: mol_type = other RNA
accaatctaaaaaatatat

SEQ ID NO: 10734 - RNA, 19 nt, synthetic construct
  source 1..19: mol_type = other RNA
taccaatctaaaaaatata

SEQ ID NO: 10735 - RNA, 19 nt, synthetic construct
  source 1..19: mol_type = other RNA
ttaccaatctaaaaaatat

SEQ ID NO: 10736 - RNA, 19 nt, synthetic construct
  source 1..19: mol_type = other RNA
attaccaatctaaaaaata

SEQ ID NO: 10737 - RNA, 19 nt, synthetic construct
  source 1..19: mol_type = other RNA
tattaccaatctaaaaaat

SEQ ID NO: 10738 - RNA, 19 nt, synthetic construct
  source 1..19: mol_type = other RNA
atattaccaatctaaaaaa

SEQ ID NO: 10739 - RNA, 19 nt, synthetic construct
  source 1..19: mol_type = other RNA
aatattaccaatctaaaaa

SEQ ID NO: 10740 - RNA, 19 nt, synthetic construct
  source 1..19: mol_type = other RNA
aaatattaccaatctaaaa

SEQ ID NO: 10741 - RNA, 19 nt, synthetic construct
  source 1..19: mol_type = other RNA
taaatattaccaatctaaa

SEQ ID NO: 10742 - RNA, 19 nt, synthetic construct
  source 1..19: mol_type = other RNA
ttaaatattaccaatctaa

SEQ ID NO: 10743 - RNA, 19 nt, synthetic construct
  source 1..19: mol_type = other RNA
tttaaatattaccaatcta

SEQ ID NO: 10744 - RNA, 19 nt, synthetic construct
  source 1..19: mol_type = other RNA
gtttaaatattaccaatct

SEQ ID NO: 10745 - RNA, 19 nt, synthetic construct
  source 1..19: mol_type = other RNA
ggtttaaatattaccaatc

SEQ ID NO: 10746 - RNA, 19 nt, synthetic construct
  source 1..19: mol_type = other RNA
tggtttaaatattaccaat

SEQ ID NO: 10747 - RNA, 19 nt, synthetic construct
  source 1..19: mol_type = other RNA
ctggtttaaatattaccaa

SEQ ID NO: 10748 - RNA, 19 nt, synthetic construct
  source 1..19: mol_type = other RNA
gctggtttaaatattacca

SEQ ID NO: 10749 - RNA, 19 nt, synthetic construct
  source 1..19: mol_type = other RNA
tgctggtttaaatattacc

SEQ ID NO: 10750 - RNA, 19 nt, synthetic construct
  source 1..19: mol_type = other RNA
ttgctggtttaaatattac

SEQ ID NO: 10751 - RNA, 19 nt, synthetic construct
  source 1..19: mol_type = other RNA
tttgctggtttaaatatta

SEQ ID NO: 10752 - RNA, 19 nt, synthetic construct
  source 1..19: mol_type = other RNA
atttgctggtttaaatatt

SEQ ID NO: 10753 - RNA, 19 nt, synthetic construct
  source 1..19: mol_type = other RNA
tatttgctggtttaaatat

SEQ ID NO: 10754 - RNA, 19 nt, synthetic construct
  source 1..19: mol_type = other RNA
gtatttgctggtttaaata

SEQ ID NO: 10755 - RNA, 19 nt, synthetic construct
  source 1..19: mol_type = other RNA
agtatttgctggtttaaat

SEQ ID NO: 10756 - RNA, 19 nt, synthetic construct
  source 1..19: mol_type = other RNA
aagtatttgctggtttaaa

SEQ ID NO: 10757 - RNA, 19 nt, synthetic construct
  source 1..19: mol_type = other RNA
taagtatttgctggtttaa

SEQ ID NO: 10758 - RNA, 19 nt, synthetic construct
  source 1..19: mol_type = other RNA
ttaagtatttgctggttta

SEQ ID NO: 10759 - RNA, 19 nt, synthetic construct
  source 1..19: mol_type = other RNA
tttaagtatttgctggttt

SEQ ID NO: 10760 - RNA, 19 nt, synthetic construct
  source 1..19: mol_type = other RNA
ctttaagtatttgctggtt

SEQ ID NO: 10761 - RNA, 19 nt, synthetic construct
  source 1..19: mol_type = other RNA
gctttaagtatttgctggt

SEQ ID NO: 10762 - RNA, 19 nt, synthetic construct
  source 1..19: mol_type = other RNA
agctttaagtatttgctgg

SEQ ID NO: 10763 - RNA, 19 nt, synthetic construct
  source 1..19: mol_type = other RNA
aagctttaagtatttgctg

SEQ ID NO: 10764 - RNA, 19 nt, synthetic construct
  source 1..19: mol_type = other RNA
aaagctttaagtatttgct

SEQ ID NO: 10765 - RNA, 19 nt, synthetic construct
  source 1..19: mol_type = other RNA
taaagctttaagtatttgc

SEQ ID NO: 10766 - RNA, 19 nt, synthetic construct
  source 1..19: mol_type = other RNA
ataaagctttaagtatttg

SEQ ID NO: 10767 - RNA, 19 nt, synthetic construct
  source 1..19: mol_type = other RNA
aataaagctttaagtattt

SEQ ID NO: 10768 - RNA, 19 nt, synthetic construct
  source 1..19: mol_type = other RNA
taataaagctttaagtatt

SEQ ID NO: 10769 - RNA, 19 nt, synthetic construct
  source 1..19: mol_type = other RNA
ttaataaagctttaagtat

SEQ ID NO: 10770 - RNA, 19 nt, synthetic construct
  source 1..19: mol_type = other RNA
tttaataaagctttaagta

SEQ ID NO: 10771 - RNA, 19 nt, synthetic construct
  source 1..19: mol_type = other RNA
gtttaataaagctttaagt

SEQ ID NO: 10772 - RNA, 19 nt, synthetic construct
  source 1..19: mol_type = other RNA
tgtttaataaagctttaag

SEQ ID NO: 10773 - RNA, 19 nt, synthetic construct
  source 1..19: mol_type = other RNA
atgtttaataaagctttaa

SEQ ID NO: 10774 - RNA, 19 nt, synthetic construct
  source 1..19: mol_type = other RNA
aatgtttaataaagcttta

SEQ ID NO: 10775 - RNA, 19 nt, synthetic construct
  source 1..19: mol_type = other RNA
aaatgtttaataaagcttt

SEQ ID NO: 10776 - RNA, 19 nt, synthetic construct
  source 1..19: mol_type = other RNA
aaaatgtttaataaagctt

SEQ ID NO: 10777 - RNA, 19 nt, synthetic construct
  source 1..19: mol_type = other RNA
taaaatgtttaataaagct

SEQ ID NO: 10778 - RNA, 19 nt, synthetic construct
  source 1..19: mol_type = other RNA
ttaaaatgtttaataaagc

SEQ ID NO: 10779 - RNA, 19 nt, synthetic construct
  source 1..19: mol_type = other RNA
attaaaatgtttaataaag

SEQ ID NO: 10780 - RNA, 19 nt, synthetic construct
  source 1..19: mol_type = other RNA
gattaaaatgtttaataaa

SEQ ID NO: 10781 - RNA, 19 nt, synthetic construct
  source 1..19: mol_type = other RNA
tgattaaaatgtttaataa

SEQ ID NO: 10782 - RNA, 19 nt, synthetic construct
  source 1..19: mol_type = other RNA
ctgattaaaatgtttaata

SEQ ID NO: 10783 - RNA, 19 nt, synthetic construct
  source 1..19: mol_type = other RNA
tctgattaaaatgtttaat

SEQ ID NO: 10784 - RNA, 19 nt, synthetic construct
  source 1..19: mol_type = other RNA
atctgattaaaatgtttaa

SEQ ID NO: 10785 - RNA, 19 nt, synthetic construct
  source 1..19: mol_type = other RNA
tatctgattaaaatgttta

SEQ ID NO: 10786 - RNA, 19 nt, synthetic construct
  source 1..19: mol_type = other RNA
ttatctgattaaaatgttt

SEQ ID NO: 10787 - RNA, 19 nt, synthetic construct
  source 1..19: mol_type = other RNA
cttatctgattaaaatgtt

SEQ ID NO: 10788 - RNA, 19 nt, synthetic construct
  source 1..19: mol_type = other RNA
acttatctgattaaaatgt

SEQ ID NO: 10789 - RNA, 19 nt, synthetic construct
  source 1..19: mol_type = other RNA
cacttatctgattaaaatg

SEQ ID NO: 10790 - RNA, 19 nt, synthetic construct
  source 1..19: mol_type = other RNA
tcacttatctgattaaaat

SEQ ID NO: 10791 - RNA, 19 nt, synthetic construct
  source 1..19: mol_type = other RNA
ctcacttatctgattaaaa

SEQ ID NO: 10792 - RNA, 19 nt, synthetic construct
  source 1..19: mol_type = other RNA
actcacttatctgattaaa

SEQ ID NO: 10793 - RNA, 19 nt, synthetic construct
  source 1..19: mol_type = other RNA
tactcacttatctgattaa

SEQ ID NO: 10794 - RNA, 19 nt, synthetic construct
  source 1..19: mol_type = other RNA
ttactcacttatctgatta

SEQ ID NO: 10795 - RNA, 19 nt, synthetic construct
  source 1..19: mol_type = other RNA
tttactcacttatctgatt

SEQ ID NO: 10796 - RNA, 19 nt, synthetic construct
  source 1..19: mol_type = other RNA
ctttactcacttatctgat

SEQ ID NO: 10797 - RNA, 19 nt, synthetic construct
  source 1..19: mol_type = other RNA
gctttactcacttatctga

SEQ ID NO: 10798 - RNA, 19 nt, synthetic construct
  source 1..19: mol_type = other RNA
agctttactcacttatctg

SEQ ID NO: 10799 - RNA, 19 nt, synthetic construct
  source 1..19: mol_type = other RNA
aagctttactcacttatct

SEQ ID NO: 10800 - RNA, 19 nt, synthetic construct
  source 1..19: mol_type = other RNA
aaagctttactcacttatc

SEQ ID NO: 10801 - RNA, 19 nt, synthetic construct
  source 1..19: mol_type = other RNA
aaaagctttactcacttat

SEQ ID NO: 10802 - RNA, 19 nt, synthetic construct
  source 1..19: mol_type = other RNA
taaaagctttactcactta

SEQ ID NO: 10803 - RNA, 19 nt, synthetic construct
  source 1..19: mol_type = other RNA
ataaaagctttactcactt

SEQ ID NO: 10804 - RNA, 19 nt, synthetic construct
  source 1..19: mol_type = other RNA
aataaaagctttactcact

SEQ ID NO: 10805 - RNA, 19 nt, synthetic construct
  source 1..19: mol_type = other RNA
aaataaaagctttactcac

SEQ ID NO: 10806 - RNA, 19 nt, synthetic construct
  source 1..19: mol_type = other RNA
caaataaaagctttactca

SEQ ID NO: 10807 - RNA, 19 nt, synthetic construct
  source 1..19: mol_type = other RNA
gcaaataaaagctttactc

SEQ ID NO: 10808 - RNA, 19 nt, synthetic construct
  source 1..19: mol_type = other RNA
ggcaaataaaagctttact

SEQ ID NO: 10809 - RNA, 19 nt, synthetic construct
  source 1..19: mol_type = other RNA
tggcaaataaaagctttac

SEQ ID NO: 10810 - RNA, 19 nt, synthetic construct
  source 1..19: mol_type = other RNA
atggcaaataaaagcttta

SEQ ID NO: 10811 - RNA, 19 nt, synthetic construct
  source 1..19: mol_type = other RNA
aatggcaaataaaagcttt

SEQ ID NO: 10812 - RNA, 19 nt, synthetic construct
  source 1..19: mol_type = other RNA
aaatggcaaataaaagctt

SEQ ID NO: 10813 - RNA, 19 nt, synthetic construct
  source 1..19: mol_type = other RNA
caaatggcaaataaaagct

SEQ ID NO: 10814 - RNA, 19 nt, synthetic construct
  source 1..19: mol_type = other RNA
ccaaatggcaaataaaagc

SEQ ID NO: 10815 - RNA, 19 nt, synthetic construct
  source 1..19: mol_type = other RNA
tccaaatggcaaataaaag

SEQ ID NO: 10816 - RNA, 19 nt, synthetic construct
  source 1..19: mol_type = other RNA
atccaaatggcaaataaaa

SEQ ID NO: 10817 - RNA, 19 nt, synthetic construct
  source 1..19: mol_type = other RNA
catccaaatggcaaataaa

SEQ ID NO: 10818 - RNA, 19 nt, synthetic construct
  source 1..19: mol_type = other RNA
gcatccaaatggcaaataa

SEQ ID NO: 10819 - RNA, 19 nt, synthetic construct
  source 1..19: mol_type = other RNA
ggcatccaaatggcaaata

SEQ ID NO: 10820 - RNA, 19 nt, synthetic construct
  source 1..19: mol_type = other RNA
aggcatccaaatggcaaat

SEQ ID NO: 10821 - RNA, 19 nt, synthetic construct
  source 1..19: mol_type = other RNA
aaggcatccaaatggcaaa

SEQ ID NO: 10822 - RNA, 19 nt, synthetic construct
  source 1..19: mol_type = other RNA
gaaggcatccaaatggcaa

SEQ ID NO: 10823 - RNA, 19 nt, synthetic construct
  source 1..19: mol_type = other RNA
cgaaggcatccaaatggca

SEQ ID NO: 10824 - RNA, 19 nt, synthetic construct
  source 1..19: mol_type = other RNA
acgaaggcatccaaatggc

SEQ ID NO: 10825 - RNA, 19 nt, synthetic construct
  source 1..19: mol_type = other RNA
aacgaaggcatccaaatgg

SEQ ID NO: 10826 - RNA, 19 nt, synthetic construct
  source 1..19: mol_type = other RNA
gaacgaaggcatccaaatg

SEQ ID NO: 10827 - RNA, 19 nt, synthetic construct
  source 1..19: mol_type = other RNA
tgaacgaaggcatccaaat

SEQ ID NO: 10828 - RNA, 19 nt, synthetic construct
  source 1..19: mol_type = other RNA
ttgaacgaaggcatccaaa

SEQ ID NO: 10829 - RNA, 19 nt, synthetic construct
  source 1..19: mol_type = other RNA
tttgaacgaaggcatccaa

SEQ ID NO: 10830 - RNA, 19 nt, synthetic construct
  source 1..19: mol_type = other RNA
ctttgaacgaaggcatcca

SEQ ID NO: 10831 - RNA, 19 nt, synthetic construct
  source 1..19: mol_type = other RNA
actttgaacgaaggcatcc

SEQ ID NO: 10832 - RNA, 19 nt, synthetic construct
  source 1..19: mol_type = other RNA
cactttgaacgaaggcatc

SEQ ID NO: 10833 - RNA, 19 nt, synthetic construct
  source 1..19: mol_type = other RNA
tcactttgaacgaaggcat

SEQ ID NO: 10834 - RNA, 19 nt, synthetic construct
  source 1..19: mol_type = other RNA
atcactttgaacgaaggca

SEQ ID NO: 10835 - RNA, 19 nt, synthetic construct
  source 1..19: mol_type = other RNA
tatcactttgaacgaaggc

SEQ ID NO: 10836 - RNA, 19 nt, synthetic construct
  source 1..19: mol_type = other RNA
ctatcactttgaacgaagg

SEQ ID NO: 10837 - RNA, 19 nt, synthetic construct
  source 1..19: mol_type = other RNA
tctatcactttgaacgaag

SEQ ID NO: 10838 - RNA, 19 nt, synthetic construct
  source 1..19: mol_type = other RNA
ctctatcactttgaacgaa

SEQ ID NO: 10839 - RNA, 19 nt, synthetic construct
  source 1..19: mol_type = other RNA
actctatcactttgaacga

SEQ ID NO: 10840 - RNA, 19 nt, synthetic construct
  source 1..19: mol_type = other RNA
cactctatcactttgaacg

SEQ ID NO: 10841 - RNA, 19 nt, synthetic construct
  source 1..19: mol_type = other RNA
acactctatcactttgaac

SEQ ID NO: 10842 - RNA, 19 nt, synthetic construct
  source 1..19: mol_type = other RNA
aacactctatcactttgaa

SEQ ID NO: 10843 - RNA, 19 nt, synthetic construct
  source 1..19: mol_type = other RNA
aaacactctatcactttga

SEQ ID NO: 10844 - RNA, 19 nt, synthetic construct
  source 1..19: mol_type = other RNA
aaaacactctatcactttg

SEQ ID NO: 10845 - RNA, 19 nt, synthetic construct
  source 1..19: mol_type = other RNA
caaaacactctatcacttt

SEQ ID NO: 10846 - RNA, 19 nt, synthetic construct
  source 1..19: mol_type = other RNA
gcaaaacactctatcactt

SEQ ID NO: 10847 - RNA, 19 nt, synthetic construct
  source 1..19: mol_type = other RNA
agcaaaacactctatcact

SEQ ID NO: 10848 - RNA, 19 nt, synthetic construct
  source 1..19: mol_type = other RNA
cagcaaaacactctatcac

SEQ ID NO: 10849 - RNA, 19 nt, synthetic construct
  source 1..19: mol_type = other RNA
tcagcaaaacactctatca

SEQ ID NO: 10850 - RNA, 19 nt, synthetic construct
  source 1..19: mol_type = other RNA
atcagcaaaacactctatc

SEQ ID NO: 10851 - RNA, 19 nt, synthetic construct
  source 1..19: mol_type = other RNA
tatcagcaaaacactctat

SEQ ID NO: 10852 - RNA, 19 nt, synthetic construct
  source 1..19: mol_type = other RNA
ctatcagcaaaacactcta

SEQ ID NO: 10853 - RNA, 19 nt, synthetic construct
  source 1..19: mol_type = other RNA
actatcagcaaaacactct

SEQ ID NO: 10854 - RNA, 19 nt, synthetic construct
  source 1..19: mol_type = other RNA
cactatcagcaaaacactc

SEQ ID NO: 10855 - RNA, 19 nt, synthetic construct
  source 1..19: mol_type = other RNA
gcactatcagcaaaacact

SEQ ID NO: 10856 - RNA, 19 nt, synthetic construct
  source 1..19: mol_type = other RNA
agcactatcagcaaaacac

SEQ ID NO: 10857 - RNA, 19 nt, synthetic construct
  source 1..19: mol_type = other RNA
cagcactatcagcaaaaca

SEQ ID NO: 10858 - RNA, 19 nt, synthetic construct
  source 1..19: mol_type = other RNA
acagcactatcagcaaaac

SEQ ID NO: 10859 - RNA, 19 nt, synthetic construct
  source 1..19: mol_type = other RNA
tacagcactatcagcaaaa

SEQ ID NO: 10860 - RNA, 19 nt, synthetic construct
  source 1..19: mol_type = other RNA
ctacagcactatcagcaaa

SEQ ID NO: 10861 - RNA, 19 nt, synthetic construct
  source 1..19: mol_type = other RNA
gctacagcactatcagcaa

SEQ ID NO: 10862 - RNA, 19 nt, synthetic construct
  source 1..19: mol_type = other RNA
tgctacagcactatcagca

SEQ ID NO: 10863 - RNA, 19 nt, synthetic construct
  source 1..19: mol_type = other RNA
ctgctacagcactatcagc

SEQ ID NO: 10864 - RNA, 19 nt, synthetic construct
  source 1..19: mol_type = other RNA
gctgctacagcactatcag

SEQ ID NO: 10865 - RNA, 19 nt, synthetic construct
  source 1..19: mol_type = other RNA
tgctgctacagcactatca

SEQ ID NO: 10866 - RNA, 19 nt, synthetic construct
  source 1..19: mol_type = other RNA
ctgctgctacagcactatc

SEQ ID NO: 10867 - RNA, 19 nt, synthetic construct
  source 1..19: mol_type = other RNA
actgctgctacagcactat

SEQ ID NO: 10868 - RNA, 19 nt, synthetic construct
  source 1..19: mol_type = other RNA
aactgctgctacagcacta

SEQ ID NO: 10869 - RNA, 19 nt, synthetic construct
  source 1..19: mol_type = other RNA
caactgctgctacagcact

SEQ ID NO: 10870 - RNA, 19 nt, synthetic construct
  source 1..19: mol_type = other RNA
acaactgctgctacagcac

SEQ ID NO: 10871 - RNA, 19 nt, synthetic construct
  source 1..19: mol_type = other RNA
tacaactgctgctacagca

SEQ ID NO: 10872 - RNA, 19 nt, synthetic construct
  source 1..19: mol_type = other RNA
ttacaactgctgctacagc

SEQ ID NO: 10873 - RNA, 19 nt, synthetic construct
  source 1..19: mol_type = other RNA
tttacaactgctgctacag

SEQ ID NO: 10874 - RNA, 19 nt, synthetic construct
  source 1..19: mol_type = other RNA
ctttacaactgctgctaca

SEQ ID NO: 10875 - RNA, 19 nt, synthetic construct
  source 1..19: mol_type = other RNA
actttacaactgctgctac

SEQ ID NO: 10876 - RNA, 19 nt, synthetic construct
  source 1..19: mol_type = other RNA
tactttacaactgctgcta

SEQ ID NO: 10877 - RNA, 19 nt, synthetic construct
  source 1..19: mol_type = other RNA
ctactttacaactgctgct

SEQ ID NO: 10878 - RNA, 19 nt, synthetic construct
  source 1..19: mol_type = other RNA
gctactttacaactgctgc

SEQ ID NO: 10879 - RNA, 19 nt, synthetic construct
  source 1..19: mol_type = other RNA
ggctactttacaactgctg

SEQ ID NO: 10880 - RNA, 19 nt, synthetic construct
  source 1..19: mol_type = other RNA
tggctactttacaactgct

SEQ ID NO: 10881 - RNA, 19 nt, synthetic construct
  source 1..19: mol_type = other RNA
ttggctactttacaactgc

SEQ ID NO: 10882 - RNA, 19 nt, synthetic construct
  source 1..19: mol_type = other RNA
tttggctactttacaactg

SEQ ID NO: 10883 - RNA, 19 nt, synthetic construct
  source 1..19: mol_type = other RNA
ttttggctactttacaact

SEQ ID NO: 10884 - RNA, 19 nt, synthetic construct
  source 1..19: mol_type = other RNA
cttttggctactttacaac

SEQ ID NO: 10885 - RNA, 19 nt, synthetic construct
  source 1..19: mol_type = other RNA
gcttttggctactttacaa

SEQ ID NO: 10886 - RNA, 19 nt, synthetic construct
  source 1..19: mol_type = other RNA
ggcttttggctactttaca

SEQ ID NO: 10887 - RNA, 19 nt, synthetic construct
  source 1..19: mol_type = other RNA
tggcttttggctactttac

SEQ ID NO: 10888 - RNA, 19 nt, synthetic construct
  source 1..19: mol_type = other RNA
gtggcttttggctacttta

SEQ ID NO: 10889 - RNA, 19 nt, synthetic construct
  source 1..19: mol_type = other RNA
cgtggcttttggctacttt

SEQ ID NO: 10890 - RNA, 19 nt, synthetic construct
  source 1..19: mol_type = other RNA
acgtggcttttggctactt

SEQ ID NO: 10891 - RNA, 19 nt, synthetic construct
  source 1..19: mol_type = other RNA
aacgtggcttttggctact

SEQ ID NO: 10892 - RNA, 19 nt, synthetic construct
  source 1..19: mol_type = other RNA
caacgtggcttttggctac

SEQ ID NO: 10893 - RNA, 19 nt, synthetic construct
  source 1..19: mol_type = other RNA
acaacgtggcttttggcta

SEQ ID NO: 10894 - RNA, 19 nt, synthetic construct
  source 1..19: mol_type = other RNA
aacaacgtggcttttggct

SEQ ID NO: 10895 - RNA, 19 nt, synthetic construct
  source 1..19: mol_type = other RNA
aaacaacgtggcttttggc

SEQ ID NO: 10896 - RNA, 19 nt, synthetic construct
  source 1..19: mol_type = other RNA
taaacaacgtggcttttgg

SEQ ID NO: 10897 - RNA, 19 nt, synthetic construct
  source 1..19: mol_type = other RNA
ataaacaacgtggcttttg

SEQ ID NO: 10898 - RNA, 19 nt, synthetic construct
  source 1..19: mol_type = other RNA
aataaacaacgtggctttt

SEQ ID NO: 10899 - RNA, 19 nt, synthetic construct
  source 1..19: mol_type = other RNA
aaataaacaacgtggcttt

SEQ ID NO: 10900 - RNA, 19 nt, synthetic construct
  source 1..19: mol_type = other RNA
taaataaacaacgtggctt

SEQ ID NO: 10901 - RNA, 19 nt, synthetic construct
  source 1..19: mol_type = other RNA
gtaaataaacaacgtggct

SEQ ID NO: 10902 - RNA, 19 nt, synthetic construct
  source 1..19: mol_type = other RNA
agtaaataaacaacgtggc

SEQ ID NO: 10903 - RNA, 19 nt, synthetic construct
  source 1..19: mol_type = other RNA
cagtaaataaacaacgtgg

SEQ ID NO: 10904 - RNA, 19 nt, synthetic construct
  source 1..19: mol_type = other RNA
ccagtaaataaacaacgtg

SEQ ID NO: 10905 - RNA, 19 nt, synthetic construct
  source 1..19: mol_type = other RNA
accagtaaataaacaacgt

SEQ ID NO: 10906 - RNA, 19 nt, synthetic construct
  source 1..19: mol_type = other RNA
aaccagtaaataaacaacg

SEQ ID NO: 10907 - RNA, 19 nt, synthetic construct
  source 1..19: mol_type = other RNA
aaaccagtaaataaacaac

SEQ ID NO: 10908 - RNA, 19 nt, synthetic construct
  source 1..19: mol_type = other RNA
caaaccagtaaataaacaa

SEQ ID NO: 10909 - RNA, 19 nt, synthetic construct
  source 1..19: mol_type = other RNA
acaaaccagtaaataaaca

SEQ ID NO: 10910 - RNA, 19 nt, synthetic construct
  source 1..19: mol_type = other RNA
cacaaaccagtaaataaac

SEQ ID NO: 10911 - RNA, 19 nt, synthetic construct
  source 1..19: mol_type = other RNA
ccacaaaccagtaaataaa

SEQ ID NO: 10912 - RNA, 19 nt, synthetic construct
  source 1..19: mol_type = other RNA
gccacaaaccagtaaataa

SEQ ID NO: 10913 - RNA, 19 nt, synthetic construct
  source 1..19: mol_type = other RNA
ggccacaaaccagtaaata

SEQ ID NO: 10914 - RNA, 19 nt, synthetic construct
  source 1..19: mol_type = other RNA
aggccacaaaccagtaaat

SEQ ID NO: 10915 - RNA, 19 nt, synthetic construct
  source 1..19: mol_type = other RNA
aaggccacaaaccagtaaa

SEQ ID NO: 10916 - RNA, 19 nt, synthetic construct
  source 1..19: mol_type = other RNA
aaaggccacaaaccagtaa

SEQ ID NO: 10917 - RNA, 19 nt, synthetic construct
  source 1..19: mol_type = other RNA
aaaaggccacaaaccagta

SEQ ID NO: 10918 - RNA, 19 nt, synthetic construct
  source 1..19: mol_type = other RNA
taaaaggccacaaaccagt

SEQ ID NO: 10919 - RNA, 19 nt, synthetic construct
  source 1..19: mol_type = other RNA
gtaaaaggccacaaaccag

SEQ ID NO: 10920 - RNA, 19 nt, synthetic construct
  source 1..19: mol_type = other RNA
agtaaaaggccacaaacca

SEQ ID NO: 10921 - RNA, 19 nt, synthetic construct
  source 1..19: mol_type = other RNA
cagtaaaaggccacaaacc

SEQ ID NO: 10922 - RNA, 19 nt, synthetic construct
  source 1..19: mol_type = other RNA
acagtaaaaggccacaaac

SEQ ID NO: 10923 - RNA, 19 nt, synthetic construct
  source 1..19: mol_type = other RNA
cacagtaaaaggccacaaa

SEQ ID NO: 10924 - RNA, 19 nt, synthetic construct
  source 1..19: mol_type = other RNA
gcacagtaaaaggccacaa

SEQ ID NO: 10925 - RNA, 19 nt, synthetic construct
  source 1..19: mol_type = other RNA
agcacagtaaaaggccaca

SEQ ID NO: 10926 - RNA, 19 nt, synthetic construct
  source 1..19: mol_type = other RNA
aagcacagtaaaaggccac

SEQ ID NO: 10927 - RNA, 19 nt, synthetic construct
  source 1..19: mol_type = other RNA
aaagcacagtaaaaggcca

SEQ ID NO: 10928 - RNA, 19 nt, synthetic construct
  source 1..19: mol_type = other RNA
caaagcacagtaaaaggcc

SEQ ID NO: 10929 - RNA, 19 nt, synthetic construct
  source 1..19: mol_type = other RNA
acaaagcacagtaaaaggc

SEQ ID NO: 10930 - RNA, 19 nt, synthetic construct
  source 1..19: mol_type = other RNA
tacaaagcacagtaaaagg

SEQ ID NO: 10931 - RNA, 19 nt, synthetic construct
  source 1..19: mol_type = other RNA
atacaaagcacagtaaaag

SEQ ID NO: 10932 - RNA, 19 nt, synthetic construct
  source 1..19: mol_type = other RNA
gatacaaagcacagtaaaa

SEQ ID NO: 10933 - RNA, 19 nt, synthetic construct
  source 1..19: mol_type = other RNA
tgatacaaagcacagtaaa

SEQ ID NO: 10934 - RNA, 19 nt, synthetic construct
  source 1..19: mol_type = other RNA
ctgatacaaagcacagtaa

SEQ ID NO: 10935 - RNA, 19 nt, synthetic construct
  source 1..19: mol_type = other RNA
tctgatacaaagcacagta

SEQ ID NO: 10936 - RNA, 19 nt, synthetic construct
  source 1..19: mol_type = other RNA
ctctgatacaaagcacagt

SEQ ID NO: 10937 - RNA, 19 nt, synthetic construct
  source 1..19: mol_type = other RNA
actctgatacaaagcacag

SEQ ID NO: 10938 - RNA, 19 nt, synthetic construct
  source 1..19: mol_type = other RNA
aactctgatacaaagcaca

SEQ ID NO: 10939 - RNA, 19 nt, synthetic construct
  source 1..19: mol_type = other RNA
gaactctgatacaaagcac

SEQ ID NO: 10940 - RNA, 19 nt, synthetic construct
  source 1..19: mol_type = other RNA
agaactctgatacaaagca

SEQ ID NO: 10941 - RNA, 19 nt, synthetic construct
  source 1..19: mol_type = other RNA
aagaactctgatacaaagc

SEQ ID NO: 10942 - RNA, 19 nt, synthetic construct
  source 1..19: mol_type = other RNA
taagaactctgatacaaag

SEQ ID NO: 10943 - RNA, 19 nt, synthetic construct
  source 1..19: mol_type = other RNA
ttaagaactctgatacaaa

SEQ ID NO: 10944 - RNA, 19 nt, synthetic construct
  source 1..19: mol_type = other RNA
gttaagaactctgatacaa

SEQ ID NO: 10945 - RNA, 19 nt, synthetic construct
  source 1..19: mol_type = other RNA
tgttaagaactctgataca

SEQ ID NO: 10946 - RNA, 19 nt, synthetic construct
  source 1..19: mol_type = other RNA
ttgttaagaactctgatac

SEQ ID NO: 10947 - RNA, 19 nt, synthetic construct
  source 1..19: mol_type = other RNA
cttgttaagaactctgata

SEQ ID NO: 10948 - RNA, 19 nt, synthetic construct
  source 1..19: mol_type = other RNA
tcttgttaagaactctgat

SEQ ID NO: 10949 - RNA, 19 nt, synthetic construct
  source 1..19: mol_type = other RNA
atcttgttaagaactctga

SEQ ID NO: 10950 - RNA, 19 nt, synthetic construct
  source 1..19: mol_type = other RNA
aatcttgttaagaactctg

SEQ ID NO: 10951 - RNA, 19 nt, synthetic construct
  source 1..19: mol_type = other RNA
taatcttgttaagaactct

SEQ ID NO: 10952 - RNA, 19 nt, synthetic construct
  source 1..19: mol_type = other RNA
ttaatcttgttaagaactc

SEQ ID NO: 10953 - RNA, 19 nt, synthetic construct
  source 1..19: mol_type = other RNA
attaatcttgttaagaact

SEQ ID NO: 10954 - RNA, 19 nt, synthetic construct
  source 1..19: mol_type = other RNA
tattaatcttgttaagaac

SEQ ID NO: 10955 - RNA, 19 nt, synthetic construct
  source 1..19: mol_type = other RNA
ttattaatcttgttaagaa

SEQ ID NO: 10956 - RNA, 19 nt, synthetic construct
  source 1..19: mol_type = other RNA
tttattaatcttgttaaga

SEQ ID NO: 10957 - RNA, 19 nt, synthetic construct
  source 1..19: mol_type = other RNA
atttattaatcttgttaag

SEQ ID NO: 10958 - RNA, 19 nt, synthetic construct
  source 1..19: mol_type = other RNA
gatttattaatcttgttaa

SEQ ID NO: 10959 - RNA, 19 nt, synthetic construct
  source 1..19: mol_type = other RNA
tgatttattaatcttgtta

SEQ ID NO: 10960 - RNA, 19 nt, synthetic construct
  source 1..19: mol_type = other RNA
gtgatttattaatcttgtt

SEQ ID NO: 10961 - RNA, 19 nt, synthetic construct
  source 1..19: mol_type = other RNA
ggtgatttattaatcttgt

SEQ ID NO: 10962 - RNA, 19 nt, synthetic construct
  source 1..19: mol_type = other RNA
gggtgatttattaatcttg

SEQ ID NO: 10963 - RNA, 19 nt, synthetic construct
  source 1..19: mol_type = other RNA
ggggtgatttattaatctt

SEQ ID NO: 10964 - RNA, 19 nt, synthetic construct
  source 1..19: mol_type = other RNA
tggggtgatttattaatct

SEQ ID NO: 10965 - RNA, 19 nt, synthetic construct
  source 1..19: mol_type = other RNA
ctggggtgatttattaatc

SEQ ID NO: 10966 - RNA, 19 nt, synthetic construct
  source 1..19: mol_type = other RNA
actggggtgatttattaat

SEQ ID NO: 10967 - RNA, 19 nt, synthetic construct
  source 1..19: mol_type = other RNA
gactggggtgatttattaa

SEQ ID NO: 10968 - RNA, 19 nt, synthetic construct
  source 1..19: mol_type = other RNA
agactggggtgatttatta

SEQ ID NO: 10969 - RNA, 19 nt, synthetic construct
  source 1..19: mol_type = other RNA
aagactggggtgatttatt

SEQ ID NO: 10970 - RNA, 19 nt, synthetic construct
  source 1..19: mol_type = other RNA
taagactggggtgatttat

SEQ ID NO: 10971 - RNA, 19 nt, synthetic construct
  source 1..19: mol_type = other RNA
ttaagactggggtgattta

SEQ ID NO: 10972 - RNA, 19 nt, synthetic construct
  source 1..19: mol_type = other RNA
attaagactggggtgattt

SEQ ID NO: 10973 - RNA, 19 nt, synthetic construct
  source 1..19: mol_type = other RNA
aattaagactggggtgatt

SEQ ID NO: 10974 - RNA, 19 nt, synthetic construct
  source 1..19: mol_type = other RNA
aaattaagactggggtgat

SEQ ID NO: 10975 - RNA, 19 nt, synthetic construct
  source 1..19: mol_type = other RNA
aaaattaagactggggtga

SEQ ID NO: 10976 - RNA, 19 nt, synthetic construct
  source 1..19: mol_type = other RNA
aaaaattaagactggggtg

SEQ ID NO: 10977 - RNA, 19 nt, synthetic construct
  source 1..19: mol_type = other RNA
taaaaattaagactggggt

SEQ ID NO: 10978 - RNA, 19 nt, synthetic construct
  source 1..19: mol_type = other RNA
ttaaaaattaagactgggg

SEQ ID NO: 10979 - RNA, 19 nt, synthetic construct
  source 1..19: mol_type = other RNA
tttaaaaattaagactggg

SEQ ID NO: 10980 - RNA, 19 nt, synthetic construct
  source 1..19: mol_type = other RNA
ttttaaaaattaagactgg

SEQ ID NO: 10981 - RNA, 21 nt, synthetic construct
  source 1..21: mol_type = other RNA
tttaatatccggcattatatt

SEQ ID NO: 10982 - RNA, 21 nt, synthetic construct
  source 1..21: mol_type = other RNA
ttaatatccggcattatgatt

SEQ ID NO: 10983 - RNA, 21 nt, synthetic construct
  source 1..21: mol_type = other RNA
ttcagatatacatgaattatt

SEQ ID NO: 10984 - RNA, 21 nt, synthetic construct
  source 1..21: mol_type = other RNA
ctgtgaaacttttaggttatt

SEQ ID NO: 10985 - RNA, 21 nt, synthetic construct
  source 1..21: mol_type = other RNA
acattatcacaggacattatt

SEQ ID NO: 10986 - RNA, 21 nt, synthetic construct
  source 1..21: mol_type = other RNA
aattaagaagcaaacaccatt

SEQ ID NO: 10987 - RNA, 21 nt, synthetic construct
  source 1..21: mol_type = other RNA
atcccaattttgttcgtaatt

SEQ ID NO: 10988 - RNA, 21 nt, synthetic construct
  source 1..21: mol_type = other RNA
ccaattttgttcgtacttatt

SEQ ID NO: 10989 - RNA, 21 nt, synthetic construct
  source 1..21: mol_type = other RNA
caattttgttcgtactttatt

SEQ ID NO: 10990 - RNA, 21 nt, synthetic construct
  source 1..21: mol_type = other RNA
tgttcgtacttttcttacatt

SEQ ID NO: 10991 - RNA, 21 nt, synthetic construct
  source 1..21: mol_type = other RNA
tgacacttcatccaatagatt

SEQ ID NO: 10992 - RNA, 21 nt, synthetic construct
  source 1..21: mol_type = other RNA
ttgaataatttcaatggcatt

SEQ ID NO: 10993 - RNA, 21 nt, synthetic construct
  source 1..21: mol_type = other RNA
tgaataatttcaatggcgatt

SEQ ID NO: 10994 - RNA, 21 nt, synthetic construct
  source 1..21: mol_type = other RNA
gaataatttcaatggcgtatt

SEQ ID NO: 10995 - RNA, 21 nt, synthetic construct
  source 1..21: mol_type = other RNA
aacttaagtcaatcaatcatt

SEQ ID NO: 10996 - RNA, 21 nt, synthetic construct
  source 1..21: mol_type = other RNA
acagattatttgttcaacatt

SEQ ID NO: 10997 - RNA, 21 nt, synthetic construct
  source 1..21: mol_type = other RNA
aacactttataaactgtcatt

SEQ ID NO: 10998 - RNA, 21 nt, synthetic construct
  source 1..21: mol_type = other RNA
aaagacttacaaacgggaatt

SEQ ID NO: 10999 - RNA, 21 nt, synthetic construct
  source 1..21: mol_type = other RNA
atgtagtcattgacactgatt

SEQ ID NO: 11000 - RNA, 21 nt, synthetic construct
  source 1..21: mol_type = other RNA
agtcattgacactggaatatt

SEQ ID NO: 11001 - RNA, 21 nt, synthetic construct
  source 1..21: mol_type = other RNA
tataatgccggatattaaatt

SEQ ID NO: 11002 - RNA, 21 nt, synthetic construct
  source 1..21: mol_type = other RNA
tcataatgccggatattaatt

SEQ ID NO: 11003 - RNA, 21 nt, synthetic construct
  source 1..21: mol_type = other RNA
taattcatgtatatctgaatt

SEQ ID NO: 11004 - RNA, 21 nt, synthetic construct
  source 1..21: mol_type = other RNA
taacctaaaagtttcacagtt

SEQ ID NO: 11005 - RNA, 21 nt, synthetic construct
  source 1..21: mol_type = other RNA
taatgtcctgtgataatgttt

SEQ ID NO: 11006 - RNA, 21 nt, synthetic construct
  source 1..21: mol_type = other RNA
tggtgtttgcttcttaatttt

SEQ ID NO: 11007 - RNA, 21 nt, synthetic construct
  source 1..21: mol_type = other RNA
ttacgaacaaaattgggattt

SEQ ID NO: 11008 - RNA, 21 nt, synthetic construct
  source 1..21: mol_type = other RNA
taagtacgaacaaaattggtt

SEQ ID NO: 11009 - RNA, 21 nt, synthetic construct
  source 1..21: mol_type = other RNA
taaagtacgaacaaaattgtt

SEQ ID NO: 11010 - RNA, 21 nt, synthetic construct
  source 1..21: mol_type = other RNA
tgtaagaaaagtacgaacatt

SEQ ID NO: 11011 - RNA, 21 nt, synthetic construct
  source 1..21: mol_type = other RNA
tctattggatgaagtgtcatt

SEQ ID NO: 11012 - RNA, 21 nt, synthetic construct
  source 1..21: mol_type = other RNA
tgccattgaaattattcaatt

SEQ ID NO: 11013 - RNA, 21 nt, synthetic construct
  source 1..21: mol_type = other RNA
tcgccattgaaattattcatt

SEQ ID NO: 11014 - RNA, 21 nt, synthetic construct
  source 1..21: mol_type = other RNA
tacgccattgaaattattctt

SEQ ID NO: 11015 - RNA, 21 nt, synthetic construct
  source 1..21: mol_type = other RNA
tgattgattgacttaagtttt

SEQ ID NO: 11016 - RNA, 21 nt, synthetic construct
  source 1..21: mol_type = other RNA
tgttgaacaaataatctgttt

SEQ ID NO: 11017 - RNA, 21 nt, synthetic construct
  source 1..21: mol_type = other RNA
tgacagtttataaagtgtttt

SEQ ID NO: 11018 - RNA, 21 nt, synthetic construct
  source 1..21: mol_type = other RNA
ttcccgtttgtaagtcttttt

SEQ ID NO: 11019 - RNA, 21 nt, synthetic construct
  source 1..21: mol_type = other RNA
tcagtgtcaatgactacattt

SEQ ID NO: 11020 - RNA, 21 nt, synthetic construct
  source 1..21: mol_type = other RNA
tattccagtgtcaatgacttt

SEQ ID NO: 11021 - RNA, 21 nt, synthetic construct
  source 1..21: mol_type = other RNA
tttaatatccggcattatatt

SEQ ID NO: 11022 - RNA, 21 nt, synthetic construct
  source 1..21: mol_type = other RNA
ttaatatccggcattatgatt

SEQ ID NO: 11023 - RNA, 21 nt, synthetic construct
  source 1..21: mol_type = other RNA
ctgtgaaacttttaggttatt

SEQ ID NO: 11024 - RNA, 21 nt, synthetic construct
  source 1..21: mol_type = other RNA
aattaagaagcaaacaccatt

SEQ ID NO: 11025 - RNA, 21 nt, synthetic construct
  source 1..21: mol_type = other RNA
aattaagaagcaaacaccatt

SEQ ID NO: 11026 - RNA, 21 nt, synthetic construct
  source 1..21: mol_type = other RNA
aattaagaagcaaacaccatt

SEQ ID NO: 11027 - RNA, 21 nt, synthetic construct
  source 1..21: mol_type = other RNA
aattaagaagcaaacaccatt

SEQ ID NO: 11028 - RNA, 21 nt, synthetic construct
  source 1..21: mol_type = other RNA
aattaagaagcaaacaccatt

SEQ ID NO: 11029 - RNA, 21 nt, synthetic construct
  source 1..21: mol_type = other RNA
aattaagaagcaaacaccatt

SEQ ID NO: 11030 - RNA, 21 nt, synthetic construct
  source 1..21: mol_type = other RNA
aattaagaagcaaacaccatt

SEQ ID NO: 11031 - RNA, 21 nt, synthetic construct
  source 1..21: mol_type = other RNA
aattaagaagcaaacaccatt

SEQ ID NO: 11032 - RNA, 21 nt, synthetic construct
  source 1..21: mol_type = other RNA
aattaagaagcaaacaccatt

SEQ ID NO: 11033 - RNA, 21 nt, synthetic construct
  source 1..21: mol_type = other RNA
aattaagaagcaaacaccatt

SEQ ID NO: 11034 - RNA, 21 nt, synthetic construct
  source 1..21: mol_type = other RNA
aattaagaagcaaacaccatt

SEQ ID NO: 11035 - RNA, 21 nt, synthetic construct
  source 1..21: mol_type = other RNA
aattaagaagcaaacaccatt

SEQ ID NO: 11036 - RNA, 21 nt, synthetic construct
  source 1..21: mol_type = other RNA
aattaagaagcaaacaccatt

SEQ ID NO: 11037 - RNA, 21 nt, synthetic construct
  source 1..21: mol_type = other RNA
aattaagaagcaaacaccatt

SEQ ID NO: 11038 - RNA, 21 nt, synthetic construct
  source 1..21: mol_type = other RNA
aattaagaagcaaacaccatt

SEQ ID NO: 11039 - RNA, 21 nt, synthetic construct
  source 1..21: mol_type = other RNA
aattaagaagcaaacaccatt

SEQ ID NO: 11040 - RNA, 21 nt, synthetic construct
  source 1..21: mol_type = other RNA
atcccaattttgttcgtaatt

SEQ ID NO: 11041 - RNA, 21 nt, synthetic construct
  source 1..21: mol_type = other RNA
atcccaattttgttcgtaatt

SEQ ID NO: 11042 - RNA, 21 nt, synthetic construct
  source 1..21: mol_type = other RNA
atcccaattttgttcgtaatt

SEQ ID NO: 11043 - RNA, 21 nt, synthetic construct
  source 1..21: mol_type = other RNA
atcccaattttgttcgtaatt

SEQ ID NO: 11044 - RNA, 21 nt, synthetic construct
  source 1..21: mol_type = other RNA
atcccaattttgttcgtaatt

SEQ ID NO: 11045 - RNA, 21 nt, synthetic construct
  source 1..21: mol_type = other RNA
atcccaattttgttcgtaatt

SEQ ID NO: 11046 - RNA, 21 nt, synthetic construct
  source 1..21: mol_type = other RNA
caattttgttcgtactttatt

SEQ ID NO: 11047 - RNA, 21 nt, synthetic construct
  source 1..21: mol_type = other RNA
caattttgttcgtactttatt

SEQ ID NO: 11048 - RNA, 21 nt, synthetic construct
  source 1..21: mol_type = other RNA
caattttgttcgtactttatt

SEQ ID NO: 11049 - RNA, 21 nt, synthetic construct
  source 1..21: mol_type = other RNA
caattttgttcgtactttatt

SEQ ID NO: 11050 - RNA, 21 nt, synthetic construct
  source 1..21: mol_type = other RNA
caattttgttcgtactttatt

SEQ ID NO: 11051 - RNA, 21 nt, synthetic construct
  source 1..21: mol_type = other RNA
caattttgttcgtactttatt

SEQ ID NO: 11052 - RNA, 21 nt, synthetic construct
  source 1..21: mol_type = other RNA
caattttgttcgtactttatt

SEQ ID NO: 11053 - RNA, 21 nt, synthetic construct
  source 1..21: mol_type = other RNA
caattttgttcgtactttatt

SEQ ID NO: 11054 - RNA, 21 nt, synthetic construct
  source 1..21: mol_type = other RNA
caattttgttcgtactttatt

SEQ ID NO: 11055 - RNA, 21 nt, synthetic construct
  source 1..21: mol_type = other RNA
caattttgttcgtactttatt

SEQ ID NO: 11056 - RNA, 21 nt, synthetic construct
  source 1..21: mol_type = other RNA
caattttgttcgtactttatt

SEQ ID NO: 11057 - RNA, 21 nt, synthetic construct
  source 1..21: mol_type = other RNA
caattttgttcgtactttatt

SEQ ID NO: 11058 - RNA, 21 nt, synthetic construct
  source 1..21: mol_type = other RNA
caattttgttcgtactttatt

SEQ ID NO: 11059 - RNA, 21 nt, synthetic construct
  source 1..21: mol_type = other RNA
caattttgttcgtactttatt

SEQ ID NO: 11060 - RNA, 21 nt, synthetic construct
  source 1..21: mol_type = other RNA
tgttcgtacttttcttacatt

SEQ ID NO: 11061 - RNA, 21 nt, synthetic construct
  source 1..21: mol_type = other RNA
tgttcgtacttttcttacatt

SEQ ID NO: 11062 - RNA, 21 nt, synthetic construct
  source 1..21: mol_type = other RNA
tgttcgtacttttcttacatt

SEQ ID NO: 11063 - RNA, 21 nt, synthetic construct
  source 1..21: mol_type = other RNA
tgttcgtacttttcttacatt

SEQ ID NO: 11064 - RNA, 21 nt, synthetic construct
  source 1..21: mol_type = other RNA
tgttcgtacttttcttacatt

SEQ ID NO: 11065 - RNA, 21 nt, synthetic construct
  source 1..21: mol_type = other RNA
tgttcgtacttttcttacatt

SEQ ID NO: 11066 - RNA, 21 nt, synthetic construct
  source 1..21: mol_type = other RNA
tgacacttcatccaatagatt

SEQ ID NO: 11067 - RNA, 21 nt, synthetic construct
  source 1..21: mol_type = other RNA
tgacacttcatccaatagatt

SEQ ID NO: 11068 - RNA, 21 nt, synthetic construct
  source 1..21: mol_type = other RNA
tgacacttcatccaatagatt

SEQ ID NO: 11069 - RNA, 21 nt, synthetic construct
  source 1..21: mol_type = other RNA
tgacacttcatccaatagatt

SEQ ID NO: 11070 - RNA, 21 nt, synthetic construct
  source 1..21: mol_type = other RNA
tgacacttcatccaatagatt

SEQ ID NO: 11071 - RNA, 21 nt, synthetic construct
  source 1..21: mol_type = other RNA
tgacacttcatccaatagatt

SEQ ID NO: 11072 - RNA, 21 nt, synthetic construct
  source 1..21: mol_type = other RNA
tgacacttcatccaatagatt

SEQ ID NO: 11073 - RNA, 21 nt, synthetic construct
  source 1..21: mol_type = other RNA
tgacacttcatccaatagatt

SEQ ID NO: 11074 - RNA, 21 nt, synthetic construct
  source 1..21: mol_type = other RNA
ttgaataatttcaatggcatt

SEQ ID NO: 11075 - RNA, 21 nt, synthetic construct
  source 1..21: mol_type = other RNA
tgaataatttcaatggcgatt

SEQ ID NO: 11076 - RNA, 21 nt, synthetic construct
  source 1..21: mol_type = other RNA
tgaataatttcaatggcgatt

SEQ ID NO: 11077 - RNA, 21 nt, synthetic construct
  source 1..21: mol_type = other RNA
tgaataatttcaatggcgatt

SEQ ID NO: 11078 - RNA, 21 nt, synthetic construct
  source 1..21: mol_type = other RNA
tgaataatttcaatggcgatt

SEQ ID NO: 11079 - RNA, 21 nt, synthetic construct
  source 1..21: mol_type = other RNA
tgaataatttcaatggcgatt

SEQ ID NO: 11080 - RNA, 21 nt, synthetic construct
  source 1..21: mol_type = other RNA
tgaataatttcaatggcgatt

SEQ ID NO: 11081 - RNA, 21 nt, synthetic construct
  source 1..21: mol_type = other RNA
gaataatttcaatggcgtatt

SEQ ID NO: 11082 - RNA, 21 nt, synthetic construct
  source 1..21: mol_type = other RNA
acagattatttgttcaacatt

SEQ ID NO: 11083 - RNA, 21 nt, synthetic construct
  source 1..21: mol_type = other RNA
acagattatttgttcaacatt

SEQ ID NO: 11084 - RNA, 21 nt, synthetic construct
  source 1..21: mol_type = other RNA
acagattatttgttcaacatt

SEQ ID NO: 11085 - RNA, 21 nt, synthetic construct
  source 1..21: mol_type = other RNA
acagattatttgttcaacatt

SEQ ID NO: 11086 - RNA, 21 nt, synthetic construct
  source 1..21: mol_type = other RNA
acagattatttgttcaacatt

SEQ ID NO: 11087 - RNA, 21 nt, synthetic construct
  source 1..21: mol_type = other RNA
acagattatttgttcaacatt

SEQ ID NO: 11088 - RNA, 21 nt, synthetic construct
  source 1..21: mol_type = other RNA
agtcattgacactggaatatt

SEQ ID NO: 11089 - RNA, 21 nt, synthetic construct
  source 1..21: mol_type = other RNA
agtcattgacactggaatatt

SEQ ID NO: 11090 - RNA, 21 nt, synthetic construct
  source 1..21: mol_type = other RNA
agtcattgacactggaatatt

SEQ ID NO: 11091 - RNA, 21 nt, synthetic construct
  source 1..21: mol_type = other RNA
actactatgatcttgtcaatt

SEQ ID NO: 11092 - RNA, 21 nt, synthetic construct
  source 1..21: mol_type = other RNA
atggcttaatgatcagttatt

SEQ ID NO: 11093 - RNA, 21 nt, synthetic construct
  source 1..21: mol_type = other RNA
tggcttaatgatcagttgatt

SEQ ID NO: 11094 - RNA, 21 nt, synthetic construct
  source 1..21: mol_type = other RNA
tatttctcttcattatcgatt

SEQ ID NO: 11095 - RNA, 21 nt, synthetic construct
  source 1..21: mol_type = other RNA
cattatcgtagtactctaatt

SEQ ID NO: 11096 - RNA, 21 nt, synthetic construct
  source 1..21: mol_type = other RNA
tcgtagtactctagatcgatt

SEQ ID NO: 11097 - RNA, 21 nt, synthetic construct
  source 1..21: mol_type = other RNA
tagatcgaatgttagattatt

SEQ ID NO: 11098 - RNA, 21 nt, synthetic construct
  source 1..21: mol_type = other RNA
tcgttttgtagtaaaagaatt

SEQ ID NO: 11099 - RNA, 21 nt, synthetic construct
  source 1..21: mol_type = other RNA
ttttcttaccacatatcgatt

SEQ ID NO: 11100 - RNA, 21 nt, synthetic construct
  source 1..21: mol_type = other RNA
agcttactgattgaacggatt

SEQ ID NO: 11101 - RNA, 21 nt, synthetic construct
  source 1..21: mol_type = other RNA
tgtatttcggcattgggtatt

SEQ ID NO: 11102 - RNA, 21 nt, synthetic construct
  source 1..21: mol_type = other RNA
tatttcggcattgggttgatt

SEQ ID NO: 11103 - RNA, 21 nt, synthetic construct
  source 1..21: mol_type = other RNA
atttcggcattgggttgaatt

SEQ ID NO: 11104 - RNA, 21 nt, synthetic construct
  source 1..21: mol_type = other RNA
agtttgaaacatttgatcatt

SEQ ID NO: 11105 - RNA, 21 nt, synthetic construct
  source 1..21: mol_type = other RNA
caatagaaattgcacgtcatt

SEQ ID NO: 11106 - RNA, 21 nt, synthetic construct
  source 1..21: mol_type = other RNA
atgattcgccataccacaatt

SEQ ID NO: 11107 - RNA, 21 nt, synthetic construct
  source 1..21: mol_type = other RNA
tttcaatggcgtattggaatt

SEQ ID NO: 11108 - RNA, 21 nt, synthetic construct
  source 1..21: mol_type = other RNA
tacggatagaaccagataatt

SEQ ID NO: 11109 - RNA, 21 nt, synthetic construct
  source 1..21: mol_type = other RNA
ctttgaaaaccttaacccatt

SEQ ID NO: 11110 - RNA, 21 nt, synthetic construct
  source 1..21: mol_type = other RNA
aaattgaacctcgaaactatt

SEQ ID NO: 11111 - RNA, 21 nt, synthetic construct
  source 1..21: mol_type = other RNA
taaaataagctttagtcgatt

SEQ ID NO: 11112 - RNA, 21 nt, synthetic construct
  source 1..21: mol_type = other RNA
ataagctttagtcggattatt

SEQ ID NO: 11113 - RNA, 21 nt, synthetic construct
  source 1..21: mol_type = other RNA
ttcagaccttagtgtattatt

SEQ ID NO: 11114 - RNA, 21 nt, synthetic construct
  source 1..21: mol_type = other RNA
tcagaccttagtgtatttatt

SEQ ID NO: 11115 - RNA, 21 nt, synthetic construct
  source 1..21: mol_type = other RNA
agtttgatcatgatgcttatt

SEQ ID NO: 11116 - RNA, 21 nt, synthetic construct
  source 1..21: mol_type = other RNA
ttgacaagatcatagtagttt

SEQ ID NO: 11117 - RNA, 21 nt, synthetic construct
  source 1..21: mol_type = other RNA
taactgatcattaagccattt

SEQ ID NO: 11118 - RNA, 21 nt, synthetic construct
  source 1..21: mol_type = other RNA
tcaactgatcattaagccatt

SEQ ID NO: 11119 - RNA, 21 nt, synthetic construct
  source 1..21: mol_type = other RNA
tcgataatgaagagaaatatt

SEQ ID NO: 11120 - RNA, 21 nt, synthetic construct
  source 1..21: mol_type = other RNA
ttagagtactacgataatgtt

SEQ ID NO: 11121 - RNA, 21 nt, synthetic construct
  source 1..21: mol_type = other RNA
tcgatctagagtactacgatt

SEQ ID NO: 11122 - RNA, 21 nt, synthetic construct
  source 1..21: mol_type = other RNA
taatctaacattcgatctatt

SEQ ID NO: 11123 - RNA, 21 nt, synthetic construct
  source 1..21: mol_type = other RNA
ttcttttactacaaaacgatt

SEQ ID NO: 11124 - RNA, 21 nt, synthetic construct
  source 1..21: mol_type = other RNA
tcgatatgtggtaagaaaatt

SEQ ID NO: 11125 - RNA, 21 nt, synthetic construct
  source 1..21: mol_type = other RNA
tccgttcaatcagtaagcttt

SEQ ID NO: 11126 - RNA, 21 nt, synthetic construct
  source 1..21: mol_type = other RNA
tacccaatgccgaaatacatt

SEQ ID NO: 11127 - RNA, 21 nt, synthetic construct
  source 1..21: mol_type = other RNA
tcaacccaatgccgaaatatt

SEQ ID NO: 11128 - RNA, 21 nt, synthetic construct
  source 1..21: mol_type = other RNA
ttcaacccaatgccgaaattt

SEQ ID NO: 11129 - RNA, 21 nt, synthetic construct
  source 1..21: mol_type = other RNA
tgatcaaatgtttcaaacttt

SEQ ID NO: 11130 - RNA, 21 nt, synthetic construct
  source 1..21: mol_type = other RNA
tgacgtgcaatttctattgtt

SEQ ID NO: 11131 - RNA, 21 nt, synthetic construct
  source 1..21: mol_type = other RNA
ttgtggtatggcgaatcattt

SEQ ID NO: 11132 - RNA, 21 nt, synthetic construct
  source 1..21: mol_type = other RNA
ttccaatacgccattgaaatt

SEQ ID NO: 11133 - RNA, 21 nt, synthetic construct
  source 1..21: mol_type = other RNA
ttatctggttctatccgtatt

SEQ ID NO: 11134 - RNA, 21 nt, synthetic construct
  source 1..21: mol_type = other RNA
tgggttaaggttttcaaagtt

SEQ ID NO: 11135 - RNA, 21 nt, synthetic construct
  source 1..21: mol_type = other RNA
tagtttcgaggttcaattttt

SEQ ID NO: 11136 - RNA, 21 nt, synthetic construct
  source 1..21: mol_type = other RNA
tcgactaaagcttattttatt

SEQ ID NO: 11137 - RNA, 21 nt, synthetic construct
  source 1..21: mol_type = other RNA
taatccgactaaagcttattt

SEQ ID NO: 11138 - RNA, 21 nt, synthetic construct
  source 1..21: mol_type = other RNA
taatacactaaggtctgaatt

SEQ ID NO: 11139 - RNA, 21 nt, synthetic construct
  source 1..21: mol_type = other RNA
taaatacactaaggtctgatt

SEQ ID NO: 11140 - RNA, 21 nt, synthetic construct
  source 1..21: mol_type = other RNA
taagcatcatgatcaaacttt

SEQ ID NO: 11141 - RNA, 21 nt, synthetic construct
  source 1..21: mol_type = other RNA
tatttctcttcattatcgatt

SEQ ID NO: 11142 - RNA, 21 nt, synthetic construct
  source 1..21: mol_type = other RNA
tatttctcttcattatcgatt

SEQ ID NO: 11143 - RNA, 21 nt, synthetic construct
  source 1..21: mol_type = other RNA
tatttctcttcattatcgatt

SEQ ID NO: 11144 - RNA, 21 nt, synthetic construct
  source 1..21: mol_type = other RNA
tatttctcttcattatcgatt

SEQ ID NO: 11145 - RNA, 21 nt, synthetic construct
  source 1..21: mol_type = other RNA
tatttctcttcattatcgatt

SEQ ID NO: 11146 - RNA, 21 nt, synthetic construct
  source 1..21: mol_type = other RNA
tatttctcttcattatcgatt

SEQ ID NO: 11147 - RNA, 21 nt, synthetic construct
  source 1..21: mol_type = other RNA
tatttctcttcattatcgatt

SEQ ID NO: 11148 - RNA, 21 nt, synthetic construct
  source 1..21: mol_type = other RNA
tatttctcttcattatcgatt

SEQ ID NO: 11149 - RNA, 21 nt, synthetic construct
  source 1..21: mol_type = other RNA
tatttctcttcattatcgatt

SEQ ID NO: 11150 - RNA, 21 nt, synthetic construct
  source 1..21: mol_type = other RNA
tatttctcttcattatcgatt

SEQ ID NO: 11151 - RNA, 21 nt, synthetic construct
  source 1..21: mol_type = other RNA
tatttctcttcattatcgatt

SEQ ID NO: 11152 - RNA, 21 nt, synthetic construct
  source 1..21: mol_type = other RNA
tatttctcttcattatcgatt

SEQ ID NO: 11153 - RNA, 21 nt, synthetic construct
  source 1..21: mol_type = other RNA
tatttctcttcattatcgatt

SEQ ID NO: 11154 - RNA, 21 nt, synthetic construct
  source 1..21: mol_type = other RNA
tatttctcttcattatcgatt

SEQ ID NO: 11155 - RNA, 21 nt, synthetic construct
  source 1..21: mol_type = other RNA
tatttctcttcattatcgatt

SEQ ID NO: 11156 - RNA, 21 nt, synthetic construct
  source 1..21: mol_type = other RNA
tatttctcttcattatcgatt

SEQ ID NO: 11157 - RNA, 21 nt, synthetic construct
  source 1..21: mol_type = other RNA
tatttctcttcattatcgatt

SEQ ID NO: 11158 - RNA, 21 nt, synthetic construct
  source 1..21: mol_type = other RNA
tatttctcttcattatcgatt

SEQ ID NO: 11159 - RNA, 21 nt, synthetic construct
  source 1..21: mol_type = other RNA
tatttctcttcattatcgatt

SEQ ID NO: 11160 - RNA, 21 nt, synthetic construct
  source 1..21: mol_type = other RNA
tatttctcttcattatcgatt

SEQ ID NO: 11161 - RNA, 21 nt, synthetic construct
  source 1..21: mol_type = other RNA
tatttctcttcattatcgatt

SEQ ID NO: 11162 - RNA, 21 nt, synthetic construct
  source 1..21: mol_type = other RNA
tatttctcttcattatcgatt

SEQ ID NO: 11163 - RNA, 21 nt, synthetic construct
  source 1..21: mol_type = other RNA
tatttctcttcattatcgatt

SEQ ID NO: 11164 - RNA, 21 nt, synthetic construct
  source 1..21: mol_type = other RNA
tatttctcttcattatcgatt

SEQ ID NO: 11165 - RNA, 21 nt, synthetic construct
  source 1..21: mol_type = other RNA
tatttctcttcattatcgatt

SEQ ID NO: 11166 - RNA, 21 nt, synthetic construct
  source 1..21: mol_type = other RNA
tatttctcttcattatcgatt

SEQ ID NO: 11167 - RNA, 21 nt, synthetic construct
  source 1..21: mol_type = other RNA
tatttctcttcattatcgatt

SEQ ID NO: 11168 - RNA, 21 nt, synthetic construct
  source 1..21: mol_type = other RNA
tatttctcttcattatcgatt

SEQ ID NO: 11169 - RNA, 21 nt, synthetic construct
  source 1..21: mol_type = other RNA
tatttctcttcattatcgatt

SEQ ID NO: 11170 - RNA, 21 nt, synthetic construct
  source 1..21: mol_type = other RNA
tatttctcttcattatcgatt

SEQ ID NO: 11171 - RNA, 21 nt, synthetic construct
  source 1..21: mol_type = other RNA
tatttctcttcattatcgatt

SEQ ID NO: 11172 - RNA, 21 nt, synthetic construct
  source 1..21: mol_type = other RNA
tcgtagtactctagatcgatt

SEQ ID NO: 11173 - RNA, 21 nt, synthetic construct
  source 1..21: mol_type = other RNA
tagatcgaatgttagattatt

SEQ ID NO: 11174 - RNA, 21 nt, synthetic construct
  source 1..21: mol_type = other RNA
tcgttttgtagtaaaagaatt

SEQ ID NO: 11175 - RNA, 21 nt, synthetic construct
  source 1..21: mol_type = other RNA
tcgttttgtagtaaaagaatt

SEQ ID NO: 11176 - RNA, 21 nt, synthetic construct
  source 1..21: mol_type = other RNA
ttttcttaccacatatcgatt

SEQ ID NO: 11177 - RNA, 21 nt, synthetic construct
  source 1..21: mol_type = other RNA
ttttcttaccacatatcgatt

SEQ ID NO: 11178 - RNA, 21 nt, synthetic construct
  source 1..21: mol_type = other RNA
ttttcttaccacatatcgatt

SEQ ID NO: 11179 - RNA, 21 nt, synthetic construct
  source 1..21: mol_type = other RNA
ttttcttaccacatatcgatt

SEQ ID NO: 11180 - RNA, 21 nt, synthetic construct
  source 1..21: mol_type = other RNA
ttttcttaccacatatcgatt

SEQ ID NO: 11181 - RNA, 21 nt, synthetic construct
  source 1..21: mol_type = other RNA
ttttcttaccacatatcgatt

SEQ ID NO: 11182 - RNA, 21 nt, synthetic construct
  source 1..21: mol_type = other RNA
ttttcttaccacatatcgatt

SEQ ID NO: 11183 - RNA, 21 nt, synthetic construct
  source 1..21: mol_type = other RNA
ttttcttaccacatatcgatt

SEQ ID NO: 11184 - RNA, 21 nt, synthetic construct
  source 1..21: mol_type = other RNA
tatttcggcattgggttgatt

SEQ ID NO: 11185 - RNA, 21 nt, synthetic construct
  source 1..21: mol_type = other RNA
tatttcggcattgggttgatt

SEQ ID NO: 11186 - RNA, 21 nt, synthetic construct
  source 1..21: mol_type = other RNA
tatttcggcattgggttgatt

SEQ ID NO: 11187 - RNA, 21 nt, synthetic construct
  source 1..21: mol_type = other RNA
agtttgaaacatttgatcatt

SEQ ID NO: 11188 - RNA, 21 nt, synthetic construct
  source 1..21: mol_type = other RNA
agtttgaaacatttgatcatt

SEQ ID NO: 11189 - RNA, 21 nt, synthetic construct
  source 1..21: mol_type = other RNA
agtttgaaacatttgatcatt

SEQ ID NO: 11190 - RNA, 21 nt, synthetic construct
  source 1..21: mol_type = other RNA
agtttgaaacatttgatcatt

SEQ ID NO: 11191 - RNA, 21 nt, synthetic construct
  source 1..21: mol_type = other RNA
agtttgaaacatttgatcatt

SEQ ID NO: 11192 - RNA, 21 nt, synthetic construct
  source 1..21: mol_type = other RNA
agtttgaaacatttgatcatt

SEQ ID NO: 11193 - RNA, 21 nt, synthetic construct
  source 1..21: mol_type = other RNA
agtttgaaacatttgatcatt

SEQ ID NO: 11194 - RNA, 21 nt, synthetic construct
  source 1..21: mol_type = other RNA
agtttgaaacatttgatcatt

SEQ ID NO: 11195 - RNA, 21 nt, synthetic construct
  source 1..21: mol_type = other RNA
caatagaaattgcacgtcatt

SEQ ID NO: 11196 - RNA, 21 nt, synthetic construct
  source 1..21: mol_type = other RNA
caatagaaattgcacgtcatt

SEQ ID NO: 11197 - RNA, 21 nt, synthetic construct
  source 1..21: mol_type = other RNA
caatagaaattgcacgtcatt

SEQ ID NO: 11198 - RNA, 21 nt, synthetic construct
  source 1..21: mol_type = other RNA
caatagaaattgcacgtcatt

SEQ ID NO: 11199 - RNA, 21 nt, synthetic construct
  source 1..21: mol_type = other RNA
caatagaaattgcacgtcatt

SEQ ID NO: 11200 - RNA, 21 nt, synthetic construct
  source 1..21: mol_type = other RNA
caatagaaattgcacgtcatt

SEQ ID NO: 11201 - RNA, 21 nt, synthetic construct
  source 1..21: mol_type = other RNA
caatagaaattgcacgtcatt

SEQ ID NO: 11202 - RNA, 21 nt, synthetic construct
  source 1..21: mol_type = other RNA
atgattcgccataccacaatt

SEQ ID NO: 11203 - RNA, 21 nt, synthetic construct
  source 1..21: mol_type = other RNA
atgattcgccataccacaatt

SEQ ID NO: 11204 - RNA, 21 nt, synthetic construct
  source 1..21: mol_type = other RNA
atgattcgccataccacaatt

SEQ ID NO: 11205 - RNA, 21 nt, synthetic construct
  source 1..21: mol_type = other RNA
atgattcgccataccacaatt

SEQ ID NO: 11206 - RNA, 21 nt, synthetic construct
  source 1..21: mol_type = other RNA
atgattcgccataccacaatt

SEQ ID NO: 11207 - RNA, 21 nt, synthetic construct
  source 1..21: mol_type = other RNA
atgattcgccataccacaatt

SEQ ID NO: 11208 - RNA, 21 nt, synthetic construct
  source 1..21: mol_type = other RNA
atgattcgccataccacaatt

SEQ ID NO: 11209 - RNA, 21 nt, synthetic construct
  source 1..21: mol_type = other RNA
atgattcgccataccacaatt

SEQ ID NO: 11210 - RNA, 21 nt, synthetic construct
  source 1..21: mol_type = other RNA
tttcaatggcgtattggaatt

SEQ ID NO: 11211 - RNA, 21 nt, synthetic construct
  source 1..21: mol_type = other RNA
tttcaatggcgtattggaatt

SEQ ID NO: 11212 - RNA, 21 nt, synthetic construct
  source 1..21: mol_type = other RNA
tttcaatggcgtattggaatt

SEQ ID NO: 11213 - RNA, 21 nt, synthetic construct
  source 1..21: mol_type = other RNA
tttcaatggcgtattggaatt

SEQ ID NO: 11214 - RNA, 21 nt, synthetic construct
  source 1..21: mol_type = other RNA
tttcaatggcgtattggaatt

SEQ ID NO: 11215 - RNA, 21 nt, synthetic construct
  source 1..21: mol_type = other RNA
tttcaatggcgtattggaatt

SEQ ID NO: 11216 - RNA, 21 nt, synthetic construct
  source 1..21: mol_type = other RNA
tttcaatggcgtattggaatt

SEQ ID NO: 11217 - RNA, 21 nt, synthetic construct
  source 1..21: mol_type = other RNA
tttcaatggcgtattggaatt

SEQ ID NO: 11218 - RNA, 21 nt, synthetic construct
  source 1..21: mol_type = other RNA
tttcaatggcgtattggaatt

SEQ ID NO: 11219 - RNA, 21 nt, synthetic construct
  source 1..21: mol_type = other RNA
tttcaatggcgtattggaatt

SEQ ID NO: 11220 - RNA, 21 nt, synthetic construct
  source 1..21: mol_type = other RNA
tacggatagaaccagataatt

SEQ ID NO: 11221 - RNA, 21 nt, synthetic construct
  source 1..21: mol_type = other RNA
tacggatagaaccagataatt

SEQ ID NO: 11222 - RNA, 21 nt, synthetic construct
  source 1..21: mol_type = other RNA
tacggatagaaccagataatt

SEQ ID NO: 11223 - RNA, 21 nt, synthetic construct
  source 1..21: mol_type = other RNA
tacggatagaaccagataatt

SEQ ID NO: 11224 - RNA, 21 nt, synthetic construct
  source 1..21: mol_type = other RNA
tacggatagaaccagataatt

SEQ ID NO: 11225 - RNA, 21 nt, synthetic construct
  source 1..21: mol_type = other RNA
tacggatagaaccagataatt

SEQ ID NO: 11226 - RNA, 21 nt, synthetic construct
  source 1..21: mol_type = other RNA
tacggatagaaccagataatt

SEQ ID NO: 11227 - RNA, 21 nt, synthetic construct
  source 1..21: mol_type = other RNA
tacggatagaaccagataatt

SEQ ID NO: 11228 - RNA, 21 nt, synthetic construct
  source 1..21: mol_type = other RNA
tacggatagaaccagataatt

SEQ ID NO: 11229 - RNA, 21 nt, synthetic construct
  source 1..21: mol_type = other RNA
tacggatagaaccagataatt

SEQ ID NO: 11230 - RNA, 21 nt, synthetic construct
  source 1..21: mol_type = other RNA
tacggatagaaccagataatt

SEQ ID NO: 11231 - RNA, 21 nt, synthetic construct
  source 1..21: mol_type = other RNA
tacggatagaaccagataatt

SEQ ID NO: 11232 - RNA, 21 nt, synthetic construct
  source 1..21: mol_type = other RNA
tacggatagaaccagataatt

SEQ ID NO: 11233 - RNA, 21 nt, synthetic construct
  source 1..21: mol_type = other RNA
tacggatagaaccagataatt

SEQ ID NO: 11234 - RNA, 21 nt, synthetic construct
  source 1..21: mol_type = other RNA
tacggatagaaccagataatt

SEQ ID NO: 11235 - RNA, 21 nt, synthetic construct
  source 1..21: mol_type = other RNA
tacggatagaaccagataatt

SEQ ID NO: 11236 - RNA, 21 nt, synthetic construct
  source 1..21: mol_type = other RNA
ctttgaaaaccttaacccatt

SEQ ID NO: 11237 - RNA, 21 nt, synthetic construct
  source 1..21: mol_type = other RNA
ctttgaaaaccttaacccatt

SEQ ID NO: 11238 - RNA, 21 nt, synthetic construct
  source 1..21: mol_type = other RNA
ctttgaaaaccttaacccatt

SEQ ID NO: 11239 - RNA, 21 nt, synthetic construct
  source 1..21: mol_type = other RNA
ctttgaaaaccttaacccatt

SEQ ID NO: 11240 - RNA, 21 nt, synthetic construct
  source 1..21: mol_type = other RNA
ctttgaaaaccttaacccatt

SEQ ID NO: 11241 - RNA, 21 nt, synthetic construct
  source 1..21: mol_type = other RNA
ctttgaaaaccttaacccatt

SEQ ID NO: 11242 - RNA, 21 nt, synthetic construct
  source 1..21: mol_type = other RNA
ctttgaaaaccttaacccatt

SEQ ID NO: 11243 - RNA, 21 nt, synthetic construct
  source 1..21: mol_type = other RNA
aaattgaacctcgaaactatt

SEQ ID NO: 11244 - RNA, 21 nt, synthetic construct
  source 1..21: mol_type = other RNA
taaaataagctttagtcgatt

SEQ ID NO: 11245 - RNA, 21 nt, synthetic construct
  source 1..21: mol_type = other RNA
ataagctttagtcggattatt

SEQ ID NO: 11246 - RNA, 21 nt, synthetic construct
  source 1..21: mol_type = other RNA
ataagctttagtcggattatt

SEQ ID NO: 11247 - RNA, 21 nt, synthetic construct
  source 1..21: mol_type = other RNA
ttcagaccttagtgtattatt

SEQ ID NO: 11248 - RNA, 21 nt, synthetic construct
  source 1..21: mol_type = other RNA
tcagaccttagtgtatttatt

SEQ ID NO: 11249 - RNA, 21 nt, synthetic construct
  source 1..21: mol_type = other RNA
tcagaccttagtgtatttatt

SEQ ID NO: 11250 - RNA, 21 nt, synthetic construct
  source 1..21: mol_type = other RNA
agtttgatcatgatgcttatt

SEQ ID NO: 11251 - RNA, 21 nt, synthetic construct
  source 1..21: mol_type = other RNA
agtttgatcatgatgcttatt

SEQ ID NO: 11252 - RNA, 21 nt, synthetic construct
  source 1..21: mol_type = other RNA
agtttgatcatgatgcttatt

SEQ ID NO: 11253 - RNA, 5508 nt, Homo sapiens
  source 1..5508: mol_type = genomic RNA
agaagcgggccagcgccgccgggaaaggaggtcgccgcccggggtcgcccgggcttgcgggtcgccgcgcttcctctgcgggcgctgcgggaggcgagggccgcctcggcggaggaagccgaccccggggtctccgccagcccgccggcgccgcctccgagccgcctcggccgtagcctcggcccgggcgggaggcggcggccgccggcgaggcgaggcggcccgcgccctgcctgtcaggccaccggcccggcccgcgggctgcccccgatgcggaggcgctgtcgccggggccatgcagcaggcgccgcagccttacgagttcttcagcgaggagaacagtccgaaatggcggggactgttggtctcggccctgcggaaggttcaggaacaagtgcatcccactctctcagctaatgaagagtctctctattatattgaagagctgatttttcagctgcttaataaattatgcatggcccagccaaggactgttcaagatgtagaggagcgagttcagaagacctttcctcacccaattgataaatgggccattgctgatgcacaatctgctatagaaaaacgaaaacgaagaaatcctcttttactgcctgtggacaaaatccatccttcgttgaaggaagtattagggtacaaagtggactaccatgtatccctatatattgtggctgtactagagtatatctcagctgatattttaaaattggctggtaattatgtttttaatatccggcattatgaaatatctcagcaggacattaaagtgtcaatgtgtgcggataaggttttgatggacatgtttgatcaggatgacataggtttggtttctctctgtgaagatgaacctagttcttctggtgaattaaactactatgatcttgtcagaactgaaatcgcagaagaaagacagtatctacgggaattaaatatgatcataaaagtgtttcgagaagcctttctttctgatagaaagctgtttaaaccttctgatatcgaaaagatttttagtaacatttcagatatacatgaattgactgtgaaacttttaggtttgattgaagacacagttgaaatgactgatgaaagcagtcctcatcccttagctggcagctgttttgaagatttggcagaagagcaagcatttgatccttatgaaacattatcacaggacattctttcaccagagtttcatgaacatttcaataaattgatggccagacctgcagttgctctacactttcagtccattgctgatggttttaaagaggcagttcgttatgtccttccacgtcttatgctggtgccagtgtatcactgttggcactactttgagttactaaagcaattgaaagcatgtagtgaagaacaagaagacagagaatgtttgaaccaagctattactgctctcatgaatctccaaggtagcatggaccgaatttacaagcagtattcacctagacgtcgacctggagatcctgtttgccctttttatagtcaccaattaagaagcaaacacctggctatcaaaaaaatgaatgaaattcagaaaaatatcgatggatgggaaggcaaagatattggacagtgttgtaatgaattcattatggagggaccattgacaagaatcggtgccaaacatgaacggcatatttttctgtttgatggcttaatgatcagttgtaaacctaatcatggccagactcggcttccaggttacagtagtgcagaatacaggttaaaagaaaaatttgtcatgaggaaaatacaaatttgtgataaagaagatacttgtgagcacaagcatgcatttgaattagtatccaaagatgagaacagcataatatttgctgctaagtctgctgaagaaaaaaacaactggatggcagcccttatttctcttcattatcgtagtactctagatcgaatgttagattcagtattattgaaagaagaaaatgagcaaccactgagattaccaagtcctgaagtatatcgttttgtagtaaaagactctgaggaaaacattgtttttgaagacaacttgcaaagtagaagtggcatccccattattaaaggaggaactgtagtgaaattaattgaaaggttaacatatcatatgtatgcagatcccaattttgttcgtacttttcttaccacatatcgttcattttgtaaaccacaggaattgctgagcttactgattgaacggtttgaaattccagagccagaacctactgacgcagacaaattggcaatagagaaaggcgagcagccaatcagtgcagaccttaaaagatttcgcaaggaatatgtccaaccagtacaacttaggatcttaaatgtatttcggcattgggttgaacatcatttttatgactttgaaagagacttggaattgcttgaaagactagaatccttcatttcaagtgtaagagggaaagctatgaaaaaatgggtagagtcaattgctaagatcatcaggaggaagaagcaagctcaggcaaacggagtaagccataatattacctttgaaagtccacctccaccaattgaatggcatatcagcaaaccaggacagtttgaaacatttgatctcatgacacttcatccaatagaaattgcacgtcagctgacacttttggagtctgatctttacaggaaagttcaaccgtctgaacttgtagggagtgtgtggaccaaagaagataaagaaataaattctccaaatttattaaaaatgattcgccataccacaaatctcaccctctggtttgaaaaatgcattgtggaagcagaaaattttgaagaacgggtggcagtactaagtagaattatagaaattctgcaagtttttcaagatttgaataatttcaatggcgtattggagatagtcagtgcagtaaattcagtgtcagtatacagactagaccatacctttgaggcactgcaggaaaggaaaaggaaaattttggacgaagctgtggaattaagtcaagatcactttaaaaaatacctagtaaaacttaagtcaatcaatccaccttgtgtgcctttttttggaatatatttaacaaatattctgaagaccgaagaagggaataatgattttttaaaaaagaaagggaaagatttaatcaatttcagtaagaggaggaaagtagctgaaattactggagaaattcagcagtatcagaatcagccttactgtttacggatagaaccagatatgaggagattctttgaaaaccttaaccccatgggaagtgcatctgaaaaagagtttacagattatttgttcaacaagtcactagaaattgaacctcgaaactgcaaacagccacctcgatttcctaggaaatcaactttttccttaaaatctcctggaataaggcctaacacaggccgacatggctctacctcaggtactttacgaggtcacccaacaccattagaaagagaaccatgtaaaataagctttagtcggattgctgaaactgagctggaatcaacagtgtcagcaccaacctctccaaatacaccatctactccaccagtatctgcttcttcagaccttagtgtatttttagatgtggatctcaacagctcctgtggcagcaatagcatctttgctccagtgcttttgccacattcaaagtctttctttagttcatgtggtagtttacataaactaagtgaagagcccctgattcctcctcctcttcctcctcgaaaaaagtttgatcatgatgcttcaaattccaagggaaatatgaaatctgatgatgatcctcctgctattccaccgagacagcctcctcctccaaaggtaaaacccagagttcctgttcctactggtgcatttgatgggcctctgcatagtccacctccgccaccaccaagagatcctcttcctgatacccctccaccagttccccttcggcctccagaacactttataaactgtccatttaatcttcagccacctccactggggcatcttcacagagattcagactggctcagagacattagtacgtgtccaaattcgccaagcactcctcctagcacaccctctccaagggtaccgcgtcgatgctatgtgctcagttctagtcagaataatcttgctcatcctccagctccccctgttccaccaaggcagaattcaagccctcatctgccaaaactgccaccaaagacttacaaacgggagctttcgcaccccccattgtacagactgcctttgctagaaaatgcagaaactccccaatgaccttagccatatgtagtcattgacactggaatggtatttgtaaagttttttttttaatttattcaaaaaaagacatagtattttagtactttttacaaataatgctcttacaaaaatgctactgatcaaataagcttttaagaattggaaaaataaaaatacaaaagtccttcaccattatcctcaggtgatcagtagcattgccttgtcttggatcctcagtgctgccaaaaggccagtataaagaatttatatttgcactgtaaactctgcaaaaatatggtttaaagtgacatgattgcactgaaaagggatagtgcttttgtgaaatttttcaaatttgagtaatagatgcctttttaaggcagtgaatttacacaaatatgggaggggtatatggtgttactgatttttaaacctctttgaccatcttctagtttttacttctagtttttacatctaggagaattgtgaataacaccaactgttcttaaactctttaatgccatgtcttaaatgccggtatttgctgctgaagacaaaaatgaaaagtaggatgaaaataatagaatggcactgtaagtgtttattattttgtcaaaatgtaaacaaagactacataacccaatgatggagggaaaaagggcatgtatctcattcagatgtgccttttgtttttgcagactatgacgtctttagctaatgaattgcctattgttatggaaaacagttaatatgccatgtatgtacagttttgtttatattgtatatttaaagatactgctaataacctatataaatttaagtgacttgaggcctataatacaatctgctactttactaattcataaattcaaaaaaaattctatggcataggaaccaactgccttgccttcaagacctagtaactttctctataaatctcgtgttaactgaaattttttttaaatatattttttagattggtaatatttaaaccagcaaatacttaaagctttattaaacattttaatcagataagtgagtaaagcttttatttgccatttggatgccttcgttcaaagtgatagagtgttttgctgatagtgctgtagcagcagttgtaaagtagccaaaagccacgttgtttatttactggtttgtggccttttactgtgctttgtatcagagttcttaacaagattaataaatcaccccagtcttaatttttaaaa

SEQ ID NO: 11254 - RNA, 21 nt, synthetic construct
  source 1..21: mol_type = other RNA
tttaatatccggcattatatt

SEQ ID NO: 11255 - RNA, 21 nt, synthetic construct
  source 1..21: mol_type = other RNA
ttaatatccggcattatgatt

SEQ ID NO: 11256 - RNA, 21 nt, synthetic construct
  source 1..21: mol_type = other RNA
ttcagatatacatgaattatt

SEQ ID NO: 11257 - RNA, 21 nt, synthetic construct
  source 1..21: mol_type = other RNA
ctgtgaaacttttaggttatt

SEQ ID NO: 11258 - RNA, 21 nt, synthetic construct
  source 1..21: mol_type = other RNA
acattatcacaggacattatt

SEQ ID NO: 11259 - RNA, 21 nt, synthetic construct
  source 1..21: mol_type = other RNA
aattaagaagcaaacaccatt

SEQ ID NO: 11260 - RNA, 21 nt, synthetic construct
  source 1..21: mol_type = other RNA
atcccaattttgttcgtaatt

SEQ ID NO: 11261 - RNA, 21 nt, synthetic construct
  source 1..21: mol_type = other RNA
ccaattttgttcgtacttatt

SEQ ID NO: 11262 - RNA, 21 nt, synthetic construct
  source 1..21: mol_type = other RNA
caattttgttcgtactttatt

SEQ ID NO: 11263 - RNA, 21 nt, synthetic construct
  source 1..21: mol_type = other RNA
tgttcgtacttttcttacatt

SEQ ID NO: 11264 - RNA, 21 nt, synthetic construct
  source 1..21: mol_type = other RNA
tataatgccggatattaaatt

SEQ ID NO: 11265 - RNA, 21 nt, synthetic construct
  source 1..21: mol_type = other RNA
tcataatgccggatattaatt

SEQ ID NO: 11266 - RNA, 21 nt, synthetic construct
  source 1..21: mol_type = other RNA
taattcatgtatatctgaatt

SEQ ID NO: 11267 - RNA, 21 nt, synthetic construct
  source 1..21: mol_type = other RNA
taacctaaaagtttcacagtt

SEQ ID NO: 11268 - RNA, 21 nt, synthetic construct
  source 1..21: mol_type = other RNA
taatgtcctgtgataatgttt

SEQ ID NO: 11269 - RNA, 21 nt, synthetic construct
  source 1..21: mol_type = other RNA
tggtgtttgcttcttaatttt

SEQ ID NO: 11270 - RNA, 21 nt, synthetic construct
  source 1..21: mol_type = other RNA
ttacgaacaaaattgggattt

SEQ ID NO: 11271 - RNA, 21 nt, synthetic construct
  source 1..21: mol_type = other RNA
taagtacgaacaaaattggtt

SEQ ID NO: 11272 - RNA, 21 nt, synthetic construct
  source 1..21: mol_type = other RNA
taaagtacgaacaaaattgtt

SEQ ID NO: 11273 - RNA, 21 nt, synthetic construct
  source 1..21: mol_type = other RNA
tgtaagaaaagtacgaacatt

SEQ ID NO: 11274 - RNA, 21 nt, synthetic construct
  source 1..21: mol_type = other RNA
tttaatatccggcattatatt

SEQ ID NO: 11275 - RNA, 21 nt, synthetic construct
  source 1..21: mol_type = other RNA
ttaatatccggcattatgatt

SEQ ID NO: 11276 - RNA, 21 nt, synthetic construct
  source 1..21: mol_type = other RNA
ttcagatatacatgaattatt

SEQ ID NO: 11277 - RNA, 21 nt, synthetic construct
  source 1..21: mol_type = other RNA
ctgtgaaacttttaggttatt

SEQ ID NO: 11278 - RNA, 21 nt, synthetic construct
  source 1..21: mol_type = other RNA
acattatcacaggacattatt

SEQ ID NO: 11279 - RNA, 21 nt, synthetic construct
  source 1..21: mol_type = other RNA
aattaagaagcaaacaccatt

SEQ ID NO: 11280 - RNA, 21 nt, synthetic construct
  source 1..21: mol_type = other RNA
atcccaattttgttcgtaatt

SEQ ID NO: 11281 - RNA, 21 nt, synthetic construct
  source 1..21: mol_type = other RNA
ccaattttgttcgtacttatt

SEQ ID NO: 11282 - RNA, 21 nt, synthetic construct
  source 1..21: mol_type = other RNA
caattttgttcgtactttatt

SEQ ID NO: 11283 - RNA, 21 nt, synthetic construct
  source 1..21: mol_type = other RNA
tgttcgtacttttcttacatt

SEQ ID NO: 11284 - RNA, 19 nt, synthetic construct
  source 1..19: mol_type = other RNA
tttaatatccggcattata

SEQ ID NO: 11285 - RNA, 19 nt, synthetic construct
  source 1..19: mol_type = other RNA
ttaatatccggcattatga

SEQ ID NO: 11286 - RNA, 19 nt, synthetic construct
  source 1..19: mol_type = other RNA
ttcagatatacatgaatta

SEQ ID NO: 11287 - RNA, 19 nt, synthetic construct
  source 1..19: mol_type = other RNA
ctgtgaaacttttaggtta

SEQ ID NO: 11288 - RNA, 19 nt, synthetic construct
  source 1..19: mol_type = other RNA
acattatcacaggacatta

SEQ ID NO: 11289 - RNA, 19 nt, synthetic construct
  source 1..19: mol_type = other RNA
aattaagaagcaaacacca

SEQ ID NO: 11290 - RNA, 19 nt, synthetic construct
  source 1..19: mol_type = other RNA
atcccaattttgttcgtaa

SEQ ID NO: 11291 - RNA, 19 nt, synthetic construct
  source 1..19: mol_type = other RNA
ccaattttgttcgtactta

SEQ ID NO: 11292 - RNA, 19 nt, synthetic construct
  source 1..19: mol_type = other RNA
caattttgttcgtacttta

SEQ ID NO: 11293 - RNA, 19 nt, synthetic construct
  source 1..19: mol_type = other RNA
tgttcgtacttttcttaca

SEQ ID NO: 11294 - RNA, 18 nt, synthetic construct
  source 1..18: mol_type = other RNA
tttaatatccggcattat

SEQ ID NO: 11295 - RNA, 18 nt, synthetic construct
  source 1..18: mol_type = other RNA
ttaatatccggcattatg

SEQ ID NO: 11296 - RNA, 18 nt, synthetic construct
  source 1..18: mol_type = other RNA
ttcagatatacatgaatt

SEQ ID NO: 11297 - RNA, 18 nt, synthetic construct
  source 1..18: mol_type = other RNA
ctgtgaaacttttaggtt

SEQ ID NO: 11298 - RNA, 18 nt, synthetic construct
  source 1..18: mol_type = other RNA
acattatcacaggacatt

SEQ ID NO: 11299 - RNA, 18 nt, synthetic construct
  source 1..18: mol_type = other RNA
aattaagaagcaaacacc

SEQ ID NO: 11300 - RNA, 18 nt, synthetic construct
  source 1..18: mol_type = other RNA
atcccaattttgttcgta

SEQ ID NO: 11301 - RNA, 18 nt, synthetic construct
  source 1..18: mol_type = other RNA
ccaattttgttcgtactt

SEQ ID NO: 11302 - RNA, 18 nt, synthetic construct
  source 1..18: mol_type = other RNA
caattttgttcgtacttt

SEQ ID NO: 11303 - RNA, 18 nt, synthetic construct
  source 1..18: mol_type = other RNA
tgttcgtacttttcttac

SEQ ID NO: 11304 - RNA, 21 nt, synthetic construct
  source 1..21: mol_type = other RNA
tataatgccggatattaaatt

SEQ ID NO: 11305 - RNA, 21 nt, synthetic construct
  source 1..21: mol_type = other RNA
tcataatgccggatattaatt

SEQ ID NO: 11306 - RNA, 21 nt, synthetic construct
  source 1..21: mol_type = other RNA
taattcatgtatatctgaatt

SEQ ID NO: 11307 - RNA, 21 nt, synthetic construct
  source 1..21: mol_type = other RNA
taacctaaaagtttcacagtt

SEQ ID NO: 11308 - RNA, 21 nt, synthetic construct
  source 1..21: mol_type = other RNA
taatgtcctgtgataatgttt

SEQ ID NO: 11309 - RNA, 21 nt, synthetic construct
  source 1..21: mol_type = other RNA
tggtgtttgcttcttaatttt

SEQ ID NO: 11310 - RNA, 21 nt, synthetic construct
  source 1..21: mol_type = other RNA
ttacgaacaaaattgggattt

SEQ ID NO: 11311 - RNA, 21 nt, synthetic construct
  source 1..21: mol_type = other RNA
taagtacgaacaaaattggtt

SEQ ID NO: 11312 - RNA, 21 nt, synthetic construct
  source 1..21: mol_type = other RNA
taaagtacgaacaaaattgtt

SEQ ID NO: 11313 - RNA, 21 nt, synthetic construct
  source 1..21: mol_type = other RNA
tgtaagaaaagtacgaacatt

SEQ ID NO: 11314 - RNA, 19 nt, synthetic construct
  source 1..19: mol_type = other RNA
tataatgccggatattaaa

SEQ ID NO: 11315 - RNA, 19 nt, synthetic construct
  source 1..19: mol_type = other RNA
tcataatgccggatattaa

SEQ ID NO: 11316 - RNA, 19 nt, synthetic construct
  source 1..19: mol_type = other RNA
taattcatgtatatctgaa

SEQ ID NO: 11317 - RNA, 19 nt, synthetic construct
  source 1..19: mol_type = other RNA
taacctaaaagtttcacag

SEQ ID NO: 11318 - RNA, 19 nt, synthetic construct
  source 1..19: mol_type = other RNA
taatgtcctgtgataatgt

SEQ ID NO: 11319 - RNA, 19 nt, synthetic construct
  source 1..19: mol_type = other RNA
tggtgtttgcttcttaatt

SEQ ID NO: 11320 - RNA, 19 nt, synthetic construct
  source 1..19: mol_type = other RNA
ttacgaacaaaattgggat

SEQ ID NO: 11321 - RNA, 19 nt, synthetic construct
  source 1..19: mol_type = other RNA
taagtacgaacaaaattgg

SEQ ID NO: 11322 - RNA, 19 nt, synthetic construct
  source 1..19: mol_type = other RNA
taaagtacgaacaaaattg

SEQ ID NO: 11323 - RNA, 19 nt, synthetic construct
  source 1..19: mol_type = other RNA
tgtaagaaaagtacgaaca

SEQ ID NO: 11324 - RNA, 18 nt, synthetic construct
  source 1..18: mol_type = other RNA
ataatgccggatattaaa

SEQ ID NO: 11325 - RNA, 18 nt, synthetic construct
  source 1..18: mol_type = other RNA
cataatgccggatattaa

SEQ ID NO: 11326 - RNA, 18 nt, synthetic construct
  source 1..18: mol_type = other RNA
aattcatgtatatctgaa

SEQ ID NO: 11327 - RNA, 18 nt, synthetic construct
  source 1..18: mol_type = other RNA
aacctaaaagtttcacag

SEQ ID NO: 11328 - RNA, 18 nt, synthetic construct
  source 1..18: mol_type = other RNA
aatgtcctgtgataatgt

SEQ ID NO: 11329 - RNA, 18 nt, synthetic construct
  source 1..18: mol_type = other RNA
ggtgtttgcttcttaatt

SEQ ID NO: 11330 - RNA, 18 nt, synthetic construct
  source 1..18: mol_type = other RNA
tacgaacaaaattgggat

SEQ ID NO: 11331 - RNA, 18 nt, synthetic construct
  source 1..18: mol_type = other RNA
aagtacgaacaaaattgg

SEQ ID NO: 11332 - RNA, 18 nt, synthetic construct
  source 1..18: mol_type = other RNA
aaagtacgaacaaaattg

SEQ ID NO: 11333 - RNA, 18 nt, synthetic construct
  source 1..18: mol_type = other RNA
gtaagaaaagtacgaaca

SEQ ID NO: 11334 - RNA, 21 nt, synthetic construct
  source 1..21: mol_type = other RNA
tgacacttcatccaatagatt

SEQ ID NO: 11335 - RNA, 21 nt, synthetic construct
  source 1..21: mol_type = other RNA
ttgaataatttcaatggcatt

SEQ ID NO: 11336 - RNA, 21 nt, synthetic construct
  source 1..21: mol_type = other RNA
tgaataatttcaatggcgatt

SEQ ID NO: 11337 - RNA, 21 nt, synthetic construct
  source 1..21: mol_type = other RNA
gaataatttcaatggcgtatt

SEQ ID NO: 11338 - RNA, 21 nt, synthetic construct
  source 1..21: mol_type = other RNA
aacttaagtcaatcaatcatt

SEQ ID NO: 11339 - RNA, 21 nt, synthetic construct
  source 1..21: mol_type = other RNA
acagattatttgttcaacatt

SEQ ID NO: 11340 - RNA, 21 nt, synthetic construct
  source 1..21: mol_type = other RNA
aacactttataaactgtcatt

SEQ ID NO: 11341 - RNA, 21 nt, synthetic construct
  source 1..21: mol_type = other RNA
aaagacttacaaacgggaatt

SEQ ID NO: 11342 - RNA, 21 nt, synthetic construct
  source 1..21: mol_type = other RNA
atgtagtcattgacactgatt

SEQ ID NO: 11343 - RNA, 21 nt, synthetic construct
  source 1..21: mol_type = other RNA
agtcattgacactggaatatt

SEQ ID NO: 11344 - RNA, 21 nt, synthetic construct
  source 1..21: mol_type = other RNA
tctattggatgaagtgtcatt

SEQ ID NO: 11345 - RNA, 21 nt, synthetic construct
  source 1..21: mol_type = other RNA
tgccattgaaattattcaatt

SEQ ID NO: 11346 - RNA, 21 nt, synthetic construct
  source 1..21: mol_type = other RNA
tcgccattgaaattattcatt

SEQ ID NO: 11347 - RNA, 21 nt, synthetic construct
  source 1..21: mol_type = other RNA
tacgccattgaaattattctt

SEQ ID NO: 11348 - RNA, 21 nt, synthetic construct
  source 1..21: mol_type = other RNA
tgattgattgacttaagtttt

SEQ ID NO: 11349 - RNA, 21 nt, synthetic construct
  source 1..21: mol_type = other RNA
tgttgaacaaataatctgttt

SEQ ID NO: 11350 - RNA, 21 nt, synthetic construct
  source 1..21: mol_type = other RNA
tgacagtttataaagtgtttt

SEQ ID NO: 11351 - RNA, 21 nt, synthetic construct
  source 1..21: mol_type = other RNA
ttcccgtttgtaagtcttttt

SEQ ID NO: 11352 - RNA, 21 nt, synthetic construct
  source 1..21: mol_type = other RNA
tcagtgtcaatgactacattt

SEQ ID NO: 11353 - RNA, 21 nt, synthetic construct
  source 1..21: mol_type = other RNA
tattccagtgtcaatgacttt

SEQ ID NO: 11354 - RNA, 21 nt, synthetic construct
  source 1..21: mol_type = other RNA
tgacacttcatccaatagatt

SEQ ID NO: 11355 - RNA, 21 nt, synthetic construct
  source 1..21: mol_type = other RNA
ttgaataatttcaatggcatt

SEQ ID NO: 11356 - RNA, 21 nt, synthetic construct
  source 1..21: mol_type = other RNA
tgaataatttcaatggcgatt

SEQ ID NO: 11357 - RNA, 21 nt, synthetic construct
  source 1..21: mol_type = other RNA
gaataatttcaatggcgtatt

SEQ ID NO: 11358 - RNA, 21 nt, synthetic construct
  source 1..21: mol_type = other RNA
aacttaagtcaatcaatcatt

SEQ ID NO: 11359 - RNA, 21 nt, synthetic construct
  source 1..21: mol_type = other RNA
acagattatttgttcaacatt

SEQ ID NO: 11360 - RNA, 21 nt, synthetic construct
  source 1..21: mol_type = other RNA
aacactttataaactgtcatt

SEQ ID NO: 11361 - RNA, 21 nt, synthetic construct
  source 1..21: mol_type = other RNA
aaagacttacaaacgggaatt

SEQ ID NO: 11362 - RNA, 21 nt, synthetic construct
  source 1..21: mol_type = other RNA
atgtagtcattgacactgatt

SEQ ID NO: 11363 - RNA, 21 nt, synthetic construct
  source 1..21: mol_type = other RNA
agtcattgacactggaatatt

SEQ ID NO: 11364 - RNA, 19 nt, synthetic construct
  source 1..19: mol_type = other RNA
tgacacttcatccaataga

SEQ ID NO: 11365 - RNA, 19 nt, synthetic construct
  source 1..19: mol_type = other RNA
ttgaataatttcaatggca

SEQ ID NO: 11366 - RNA, 19 nt, synthetic construct
  source 1..19: mol_type = other RNA
tgaataatttcaatggcga

SEQ ID NO: 11367 - RNA, 19 nt, synthetic construct
  source 1..19: mol_type = other RNA
gaataatttcaatggcgta

SEQ ID NO: 11368 - RNA, 19 nt, synthetic construct
  source 1..19: mol_type = other RNA
aacttaagtcaatcaatca

SEQ ID NO: 11369 - RNA, 19 nt, synthetic construct
  source 1..19: mol_type = other RNA
acagattatttgttcaaca

SEQ ID NO: 11370 - RNA, 19 nt, synthetic construct
  source 1..19: mol_type = other RNA
aacactttataaactgtca

SEQ ID NO: 11371 - RNA, 19 nt, synthetic construct
  source 1..19: mol_type = other RNA
aaagacttacaaacgggaa

SEQ ID NO: 11372 - RNA, 19 nt, synthetic construct
  source 1..19: mol_type = other RNA
atgtagtcattgacactga

SEQ ID NO: 11373 - RNA, 19 nt, synthetic construct
  source 1..19: mol_type = other RNA
agtcattgacactggaata

SEQ ID NO: 11374 - RNA, 18 nt, synthetic construct
  source 1..18: mol_type = other RNA
tgacacttcatccaatag

SEQ ID NO: 11375 - RNA, 18 nt, synthetic construct
  source 1..18: mol_type = other RNA
ttgaataatttcaatggc

SEQ ID NO: 11376 - RNA, 18 nt, synthetic construct
  source 1..18: mol_type = other RNA
tgaataatttcaatggcg

SEQ ID NO: 11377 - RNA, 18 nt, synthetic construct
  source 1..18: mol_type = other RNA
gaataatttcaatggcgt

SEQ ID NO: 11378 - RNA, 18 nt, synthetic construct
  source 1..18: mol_type = other RNA
aacttaagtcaatcaatc

SEQ ID NO: 11379 - RNA, 18 nt, synthetic construct
  source 1..18: mol_type = other RNA
acagattatttgttcaac

SEQ ID NO: 11380 - RNA, 18 nt, synthetic construct
  source 1..18: mol_type = other RNA
aacactttataaactgtc

SEQ ID NO: 11381 - RNA, 18 nt, synthetic construct
  source 1..18: mol_type = other RNA
aaagacttacaaacggga

SEQ ID NO: 11382 - RNA, 18 nt, synthetic construct
  source 1..18: mol_type = other RNA
atgtagtcattgacactg

SEQ ID NO: 11383 - RNA, 18 nt, synthetic construct
  source 1..18: mol_type = other RNA
agtcattgacactggaat

SEQ ID NO: 11384 - RNA, 21 nt, synthetic construct
  source 1..21: mol_type = other RNA
tctattggatgaagtgtcatt

SEQ ID NO: 11385 - RNA, 21 nt, synthetic construct
  source 1..21: mol_type = other RNA
tgccattgaaattattcaatt

SEQ ID NO: 11386 - RNA, 21 nt, synthetic construct
  source 1..21: mol_type = other RNA
tcgccattgaaattattcatt

SEQ ID NO: 11387 - RNA, 21 nt, synthetic construct
  source 1..21: mol_type = other RNA
tacgccattgaaattattctt

SEQ ID NO: 11388 - RNA, 21 nt, synthetic construct
  source 1..21: mol_type = other RNA
tgattgattgacttaagtttt

SEQ ID NO: 11389 - RNA, 21 nt, synthetic construct
  source 1..21: mol_type = other RNA
tgttgaacaaataatctgttt

SEQ ID NO: 11390 - RNA, 21 nt, synthetic construct
  source 1..21: mol_type = other RNA
tgacagtttataaagtgtttt

SEQ ID NO: 11391 - RNA, 21 nt, synthetic construct
  source 1..21: mol_type = other RNA
ttcccgtttgtaagtcttttt

SEQ ID NO: 11392 - RNA, 21 nt, synthetic construct
  source 1..21: mol_type = other RNA
tcagtgtcaatgactacattt

SEQ ID NO: 11393 - RNA, 21 nt, synthetic construct
  source 1..21: mol_type = other RNA
tattccagtgtcaatgacttt

SEQ ID NO: 11394 - RNA, 19 nt, synthetic construct
  source 1..19: mol_type = other RNA
tctattggatgaagtgtca

SEQ ID NO: 11395 - RNA, 19 nt, synthetic construct
  source 1..19: mol_type = other RNA
tgccattgaaattattcaa

SEQ ID NO: 11396 - RNA, 19 nt, synthetic construct
  source 1..19: mol_type = other RNA
tcgccattgaaattattca

SEQ ID NO: 11397 - RNA, 19 nt, synthetic construct
  source 1..19: mol_type = other RNA
tacgccattgaaattattc

SEQ ID NO: 11398 - RNA, 19 nt, synthetic construct
  source 1..19: mol_type = other RNA
tgattgattgacttaagtt

SEQ ID NO: 11399 - RNA, 19 nt, synthetic construct
  source 1..19: mol_type = other RNA
tgttgaacaaataatctgt

SEQ ID NO: 11400 - RNA, 19 nt, synthetic construct
  source 1..19: mol_type = other RNA
tgacagtttataaagtgtt

SEQ ID NO: 11401 - RNA, 19 nt, synthetic construct
  source 1..19: mol_type = other RNA
ttcccgtttgtaagtcttt

SEQ ID NO: 11402 - RNA, 19 nt, synthetic construct
  source 1..19: mol_type = other RNA
tcagtgtcaatgactacat

SEQ ID NO: 11403 - RNA, 19 nt, synthetic construct
  source 1..19: mol_type = other RNA
tattccagtgtcaatgact

SEQ ID NO: 11404 - RNA, 18 nt, synthetic construct
  source 1..18: mol_type = other RNA
ctattggatgaagtgtca

SEQ ID NO: 11405 - RNA, 18 nt, synthetic construct
  source 1..18: mol_type = other RNA
gccattgaaattattcaa

SEQ ID NO: 11406 - RNA, 18 nt, synthetic construct
  source 1..18: mol_type = other RNA
cgccattgaaattattca

SEQ ID NO: 11407 - RNA, 18 nt, synthetic construct
  source 1..18: mol_type = other RNA
acgccattgaaattattc

SEQ ID NO: 11408 - RNA, 18 nt, synthetic construct
  source 1..18: mol_type = other RNA
gattgattgacttaagtt

SEQ ID NO: 11409 - RNA, 18 nt, synthetic construct
  source 1..18: mol_type = other RNA
gttgaacaaataatctgt

SEQ ID NO: 11410 - RNA, 18 nt, synthetic construct
  source 1..18: mol_type = other RNA
gacagtttataaagtgtt

SEQ ID NO: 11411 - RNA, 18 nt, synthetic construct
  source 1..18: mol_type = other RNA
tcccgtttgtaagtcttt

SEQ ID NO: 11412 - RNA, 18 nt, synthetic construct
  source 1..18: mol_type = other RNA
cagtgtcaatgactacat

SEQ ID NO: 11413 - RNA, 18 nt, synthetic construct
  source 1..18: mol_type = other RNA
attccagtgtcaatgact
